(19) United States
(12) Patent Application Publication
(10) Pub. No.: US 2017/0166899 A1
(43) Pub. Date: Jun. 15, 2017

(54) COMPOSITIONS AND METHODS FOR MODULATING GROWTH HORMONE RECEPTOR EXPRESSION

(71) Applicant: IONIS PHARMACEUTICALS, INC., Carlsbad, CA (US)

(72) Inventors: Thazha P. Prakash, Carlsbad, CA (US); Punit P. Seth, Carlsbad, CA (US); Eric E. Swayze, Encinitas, CA (US); Sanjay Bhanot, Carlsbad, CA (US); Susan M. Freier, San Diego, CA (US); Huynh-Hoa Bui, San Diego, CA (US)

(73) Assignee: IONIS PHARMACEUTICALS, INC., Carlsbad, CA (US)

(21) Appl. No.: 15/307,990

(22) PCT Filed: May 1, 2015
(86) PCT No.: PCT/US15/28887

§ 371 Date: Oct. 31, 2016

Related U.S. Application Data
(60) Provisional application No. 61/987,470, filed on May 1, 2014.
(60) Provisional application No. 62/061,071, filed on Oct. 7, 2014.
(60) Provisional application No. 62/082,511, filed on Nov. 20, 2014.

(51) Int. Cl. C12N 15/113

(52) U.S. Cl. CPC C12N 15/1138; C12N 2310/11; C12N 2310/315; C12N 2310/3341; C12N 2310/351; C12N 2310/321; C12N 2310/3231; C12N 2310/346

(57) ABSTRACT

The present embodiments provide methods, compounds, and compositions for treating, preventing, ameliorating a disease associated with excess growth hormone using antisense compounds oligonucleotides targeted to growth hormone receptor (GHR).

### SEQUENCE LISTING

[0001] The present application is being filed along with a Sequence Listing in electronic format. The Sequence Listing is provided as a file entitled BIOL0253WOSEQ_ST25.txt created Apr. 27, 2015, which is 1.29 MB in size. The information in the electronic format of the sequence listing is incorporated herein by reference in its entirety.

### FIELD

[0002] The present embodiments provide methods, compounds, and compositions for treating, preventing, or ameliorating a disease associated with excess growth hormone using antisense compounds or oligonucleotides targeted to growth hormone receptor (GHR).

### BACKGROUND

[0003] Growth hormone is produced in the pituitary and secreted into the bloodstream where it binds to growth hormone receptor (GHR) on many cell types, causing production of insulin-like growth factor-1 (IGF-1). IGF-1 is produced mainly in the liver, but also in adipose tissue and the kidney, and secreted into the bloodstream. Several disorders, such as acromegaly and gigantism, are associated with elevated growth hormone levels and/or elevated IGF-I levels in plasma and/or tissues.

[0004] Excessive production of growth hormone can lead to diseases such as acromegaly or gigantism. Acromegaly and gigantism are associated with excess growth hormone, often caused by a pituitary tumor, and affects 40-50 per million people worldwide with about 15,000 patients in each of the US and Europe and an annual incidence of about 4-5 per million people. Acromegaly and gigantism are initially characterized by abnormal growth of the hands and feet and bony changes in the facial features. Many of the growth related outcomes are mediated by elevated levels of serum IGF-1.

### SUMMARY

[0005] Embodiments provided herein relate to methods, compounds, and compositions for treating, preventing, or ameliorating a disease associated with excess growth hormone. Several embodiments provided herein are drawn to antisense compounds or oligonucleotides targeted to growth hormone receptor (GHR). Several embodiments are directed to treatment, prevention, or amelioration of acromegaly with antisense compounds or oligonucleotides targeted to growth hormone receptor (GHR).

### DETAILED DESCRIPTION

[0006] It is to be understood that both the foregoing general description and the following detailed description are exemplary and explanatory only and are not restrictive of the invention, as claimed. Herein, the use of the singular includes the plural unless specifically stated otherwise. As used herein, the use of “or” means “and/or” unless stated otherwise. Furthermore, the use of the term “including” as well as other forms, such as “includes” and “included”, is not limiting. Also, terms such as “element” or “component” encompass both elements and components comprising one unit and elements and components that comprise more than one subunit, unless specifically stated otherwise.

[0007] The section headings used herein are for organizational purposes only and are not to be construed as limiting the subject matter described. All documents, or portions of documents, cited in this application, including, but not limited to, patents, patent applications, articles, books, and treatises, are hereby expressly incorporated by reference for the portions of the document discussed herein, as well as in their entirety.

[0008] Unless specific definitions are provided, the nomenclature used in connection with, and the procedures and techniques of, analytical chemistry, synthetic organic chemistry, and medicinal and pharmaceutical chemistry described herein are those well known and commonly used in the art. Standard techniques may be used for chemical synthesis, and chemical analysis. Certain such techniques and procedures may be found for example in “Carbohydrate Modifications in Antisense Research” Edited by Sangvi and Cook, American Chemical Society, Washington D.C., 1994; “Remington's Pharmaceutical Sciences,” Mack Publishing Co., Easton, Pa., 21^{st} edition, 2005; and “Antisense Drug Technology, Principles, Strategies, and Applications” Edited by Stanley T. Crooke, CRC Press, Boca Raton, Fla.; and Sambrook et al., “Molecular Cloning, A laboratory Manual,” 2^{nd} Edition, Cold Spring Harbor Laboratory Press, 1989, which are hereby incorporated by reference for any purpose. Where permitted, all patents, applications, published applications and other publications and other data referred to throughout in the disclosure are incorporated by reference herein in their entirety.

Unless otherwise indicated, the following terms have the following meanings:

[0009] “2′-F nucleoside” refers to a nucleoside comprising a sugar comprising fluorine at the 2′ position. Unless otherwise indicated, the fluorine in a 2′-F nucleoside is in the ribo position (replacing the OH of a natural ribose).

[0010] “2′-O-methoxyethyl” (also 2′-MOE and 2′-O(CH₂)₂—OCH₃) refers to an O-methoxyethyl modification at the 2′ position of a furanose ring. A 2′-O-methoxyethyl modified sugar is a modified sugar.

[0011] “2′-MOE nucleoside” (also 2′-O-methoxyethyl nucleoside) means a nucleoside comprising a 2′-MOE modified sugar moiety.

[0012] “2′-substituted nucleoside” means a nucleoside comprising a substituent at the 2′-position other than H or OH. Unless otherwise indicated, a 2′-substituted nucleoside is not a bicyclic nucleoside.

[0013] “2′-substituted sugar moiety” means a furanosyl comprising a substituent at the 2′-position other than H or OH. Unless otherwise indicated, a 2′-substituted sugar moiety is not a bicyclic sugar moiety (i.e., the 2′-substituent of a 2′-substituted sugar moiety does not form a bridge to another atom of the furanosyl ring.

[0014] “3′ target site” refers to the nucleotide of a target nucleic acid which is complementary to the 3′-most nucleotide of a particular antisense compound.

[0015] “5′ target site” refers to the nucleotide of a target nucleic acid which is complementary to the 5′-most nucleotide of a particular antisense compound.

[0016] “5-methylcytosine” means a cytosine modified with a methyl group attached to the 5 position. A 5-methylcytosine is a modified nucleobase.

[0017] “About” means within ±10% of a value. For example, if it is stated, “the compounds affected at least about 70% inhibition of GHR”, it is implied that GHR levels are inhibited within a range of 60% and 80%.

[0018] “Administration” or “administering” refers to routes of introducing an antisense compound provided herein to a subject to perform its intended function. An example of a route of administration that can be used includes, but is not limited to parenteral administration, such as subcutaneous, intravenous, or intramuscular injection or infusion.

[0019] “Alkyl,” as used herein, means a saturated straight or branched hydrocarbon radical containing up to twenty four carbon atoms. Examples of alkyl groups include without limitation, methyl, ethyl, propyl, butyl, isopropyl, n-hexyl, octyl, decyl, dodecyl and the like. Alkyl groups typically include from 1 to about 24 carbon atoms, more typically from 1 to about 12 carbon atoms (C₁-C₁₂alkyl) with from 1 to about 6 carbon atoms being more preferred.

[0020] As used herein, “alkenyl,” means a straight or branched hydrocarbon chain radical containing up to twenty four carbon atoms and having at least one carbon-carbon double bond. Examples of alkenyl groups include without limitation, ethenyl, propenyl, butenyl, 1-methyl-2-buten-1-yl, dienes such as 1,3-butadiene and the like. Alkenyl groups typically include from 2 to about 24 carbon atoms, more typically from 2 to about 12 carbon atoms with from 2 to about 6 carbon atoms being more preferred. Alkenyl groups as used herein may optionally include one or more further substituent groups.

[0021] As used herein, “alkynyl,” means a straight or branched hydrocarbon radical containing up to twenty four carbon atoms and having at least one carbon-carbon triple bond. Examples of alkynyl groups include, without limitation, ethynyl, 1-propynyl, 1-butynyl, and the like. Alkynyl groups typically include from 2 to about 24 carbon atoms, more typically from 2 to about 12 carbon atoms with from 2 to about 6 carbon atoms being more preferred. Alkynyl groups as used herein may optionally include one or more further substituent groups.

[0022] As used herein, “acyl,” means a radical formed by removal of a hydroxyl group from an organic acid and has the general Formula —C(O)—X where X is typically aliphatic, alicyclic or aromatic. Examples include aliphatic carbonyls, aromatic carbonyls, aliphatic sulfonyls, aromatic sulfinyls, aliphatic sulfinyls, aromatic phosphates, aliphatic phosphates and the like. Acyl groups as used herein may optionally include further substituent groups.

[0023] As used herein, “alicyclic” means a cyclic ring system wherein the ring is aliphatic. The ring system can comprise one or more rings wherein at least one ring is aliphatic. Preferred alicyclics include rings having from about 5 to about 9 carbon atoms in the ring. Alicyclic as used herein may optionally include further substituent groups.

[0024] As used herein, “aliphatic” means a straight or branched hydrocarbon radical containing up to twenty four carbon atoms wherein the saturation between any two carbon atoms is a single, double or triple bond. An aliphatic group preferably contains from 1 to about 24 carbon atoms, more typically from 1 to about 12 carbon atoms with from 1 to about 6 carbon atoms being more preferred. The straight or branched chain of an aliphatic group may be interrupted with one or more heteroatoms that include nitrogen, oxygen, sulfur and phosphorus. Such aliphatic groups interrupted by heteroatoms include without limitation, polyalkoxys, such as polyalkylene glycols, polyamines, and polyimines Aliphatic groups as used herein may optionally include further substituent groups.

[0025] As used herein, “alkoxy” means a radical formed between an alkyl group and an oxygen atom wherein the oxygen atom is used to attach the alkoxy group to a parent molecule. Examples of alkoxy groups include without limitation, methoxy, ethoxy, propoxy, isopropoxy, n-butoxy, sec-butoxy, tert-butoxy, n-pentoxy, neopentoxy, n-hexoxy and the like. Alkoxy groups as used herein may optionally include further substituent groups.

[0026] As used herein, “aminoalkyl” means an amino substituted C₁-C₁₂ alkyl radical. The alkyl portion of the radical forms a covalent bond with a parent molecule. The amino group can be located at any position and the aminoalkyl group can be substituted with a further substituent group at the alkyl and/or amino portions.

[0027] As used herein, “aralkyl” and “arylalkyl” mean an aromatic group that is covalently linked to a C₁-C₁₂ alkyl radical. The alkyl radical portion of the resulting aralkyl (or arylalkyl) group forms a covalent bond with a parent molecule. Examples include without limitation, benzyl, phenethyl and the like. Aralkyl groups as used herein may optionally include further substituent groups attached to the alkyl, the aryl or both groups that form the radical group.

[0028] As used herein, “aryl” and “aromatic” mean a mono- or polycyclic carbocyclic ring system radicals having one or more aromatic rings. Examples of aryl groups include without limitation, phenyl, naphthyl, tetrahydronaphthyl, indanyl, idenyl and the like. Preferred aryl ring systems have from about 5 to about 20 carbon atoms in one or more rings. Aryl groups as used herein may optionally include further substituent groups.

[0029] “Amelioration” refers to a lessening of at least one indicator, sign, or symptom of an associated disease, disorder, or condition. In certain embodiments, amelioration includes a delay or slowing in the progression of one or more indicators of a condition or disease. The severity of indicators may be determined by subjective or objective measures, which are known to those skilled in the art.

[0030] “Animal” refers to a human or non-human animal, including, but not limited to, mice, rats, rabbits, dogs, cats, pigs, and non-human primates, including, but not limited to, monkeys and chimpanzees.

[0031] “Antisense activity” means any detectable or measurable activity attributable to the hybridization of an antisense compound to its target nucleic acid. In certain embodiments, antisense activity is a decrease in the amount or expression of a target nucleic acid or protein encoded by such target nucleic acid.

[0032] “Antisense compound” means an oligomeric compound that is capable of undergoing hybridization to a target nucleic acid through hydrogen bonding. Examples of antisense compounds include single-stranded and double-stranded compounds, such as, antisense oligonucleotides, siRNAs, shRNAs, ssRNAs, and occupancy-based compounds.

[0033] “Antisense inhibition” means reduction of target nucleic acid levels in the presence of an antisense compound complementary to a target nucleic acid compared to target nucleic acid levels in the absence of the antisense compound.

[0034] “Antisense mechanisms” are all those mechanisms involving hybridization of a compound with target nucleic acid, wherein the outcome or effect of the hybridization is either target degradation or target occupancy with concomitant stalling of the cellular machinery involving, for example, transcription or splicing.

[0035] “Antisense oligonucleotide” means a single-stranded oligonucleotide having a nucleobase sequence that permits hybridization to a corresponding region or segment of a target nucleic acid.

[0036] “Base complementarity” refers to the capacity for the precise base pairing of nucleobases of an antisense oligonucleotide with corresponding nucleobases in a target nucleic acid (i.e., hybridization), and is mediated by Watson-Crick, Hoogsteen or reversed Hoogsteen hydrogen binding between corresponding nucleobases.

[0037] “Bicyclic sugar moiety” means a modified sugar moiety comprising a 4 to 7 membered ring (including but not limited to a furanosyl) comprising a bridge connecting two atoms of the 4 to 7 membered ring to form a second ring, resulting in a bicyclic structure. In certain embodiments, the 4 to 7 membered ring is a sugar ring. In certain embodiments the 4 to 7 membered ring is a furanosyl. In certain such embodiments, the bridge connects the 2′-carbon and the 4′-carbon of the furanosyl.

[0038] “Bicyclic nucleic acid” or “BNA” or “BNA nucleosides” means a nucleoside having a sugar moiety comprising a bridge connecting two carbon atoms of the sugar ring, thereby forming a bicyclic ring system. In certain embodiments, the bridge connects the 4′-carbon and the 2′-carbon of the sugar ring.

[0039] “Cap structure” or “terminal cap moiety” means chemical modifications, which have been incorporated at either terminus of an antisense compound.

[0040] “Carbohydrate” means a naturally occurring carbohydrate, a modified carbohydrate, or a carbohydrate derivative.

[0041] “Carbohydrate cluster” means a compound having one or more carbohydrate residues attached to a scaffold or linker group. (see, e.g., Maier et al., “Synthesis of Antisense Oligonucleotides Conjugated to a Multivalent Carbohydrate Cluster for Cellular Targeting,” Bioconjugate Chemistry, 2003, (14): 18-29, which is incorporated herein by reference in its entirety, or Rensen et al., “Design and Synthesis of Novel N-Acetylgalactosamine-Terminated Glycolipids for Targeting of Lipoproteins to the Hepatic Asiaglycoprotein Receptor,” J. Med. Chem. 2004, (47): 5798-5808, for examples of carbohydrate conjugate clusters).

[0042] “Carbohydrate derivative” means any compound which may be synthesized using a carbohydrate as a starting material or intermediate.

[0043] “cEt” or “constrained ethyl” means a bicyclic sugar moiety comprising a bridge connecting the 4′-carbon and the 2′-carbon, wherein the bridge has the formula: 4′-CH(CH₃)—O-2′.

“Constrained ethyl nucleoside” (also cEt nucleoside) means a nucleoside comprising a bicyclic sugar moiety comprising a 4′-CH(CH₃)—O-2′ bridge.

[0044] “Chemically distinct region” refers to a region of an antisense compound that is in some way chemically different than another region of the same antisense compound. For example, a region having 2′-O-methoxyethyl nucleotides is chemically distinct from a region having nucleotides without 2′-O-methoxyethyl modifications.

[0045] “Chemical modification” means a chemical difference in a compound when compared to a naturally occurring counterpart. Chemical modifications of oligonucleotides include nucleoside modifications (including sugar moiety modifications and nucleobase modifications) and internucleoside linkage modifications. In reference to an oligonucleotide, chemical modification does not include differences only in nucleobase sequence.

[0046] “Chimeric antisense compounds” means antisense compounds that have at least 2 chemically distinct regions, each position having a plurality of subunits.

[0047] “Cleavable bond” means any chemical bond capable of being split. In certain embodiments, a cleavable bond is selected from among: an amide, a polyamide, an ester, an ether, one or both esters of a phosphodiester, a phosphate ester, a carbamate, a di-sulfide, or a peptide.

[0048] “Cleavable moiety” means a bond or group that is capable of being split under physiological conditions. In certain embodiments, a cleavable moiety is cleaved inside a cell or sub-cellular compartments, such as a lysosome. In certain embodiments, a cleavable moiety is cleaved by endogenous enzymes, such as nucleases. In certain embodiments, a cleavable moiety comprises a group of atoms having one, two, three, four, or more than four cleavable bonds.

[0049] “Co-administration” means administration of two or more pharmaceutical agents to an individual. The two or more pharmaceutical agents may be in a single pharmaceutical composition, or may be in separate pharmaceutical compositions. Each of the two or more pharmaceutical agents may be administered through the same or different routes of administration. Co-administration encompasses parallel or sequential administration.

[0050] “Complementarity” means the capacity for pairing between nucleobases of a first nucleic acid and a second nucleic acid.

[0051] “Comprise,” “comprises” and “comprising” will be understood to imply the inclusion of a stated step or element or group of steps or elements but not the exclusion of any other step or element or group of steps or elements.

[0052] “Conjugate” or “conjugate group” means an atom or group of atoms bound to an oligonucleotide or oligomeric compound. In general, conjugate groups modify one or more properties of the compound to which they are attached, including, but not limited to pharmacodynamic, pharmacokinetic, binding, absorption, cellular distribution, cellular uptake, charge, and/or clearance properties.

[0053] “Conjugate linker” or “linker” in the context of a conjugate group means a portion of a conjugate group comprising any atom or group of atoms and which covalently link (1) an oligonucleotide to another portion of the conjugate group or (2) two or more portions of the conjugate group.

[0054] Conjugate groups are shown herein as radicals, providing a bond for forming covalent attachment to an oligomeric compound such as an antisense oligonucleotide. In certain embodiments, the point of attachment on the oligomeric compound is the 3′-oxygen atom of the 3′-hydroxyl group of the 3′ terminal nucleoside of the oligomeric compound. In certain embodiments the point of attachment on the oligomeric compound is the 5′-oxygen atom of the 5′-hydroxyl group of the 5′ terminal nucleoside of the oligomeric compound. In certain embodiments, the bond for forming attachment to the oligomeric compound is a cleavable bond. In certain such embodiments, such cleavable bond constitutes all or part of a cleavable moiety.

[0055] In certain embodiments, conjugate groups comprise a cleavable moiety (e.g., a cleavable bond or cleavable nucleoside) and a carbohydrate cluster portion, such as a GalNAc cluster portion. Such carbohydrate cluster portion comprises: a targeting moiety and, optionally, a conjugate linker. In certain embodiments, the carbohydrate cluster portion is identified by the number and identity of the ligand. For example, in certain embodiments, the carbohydrate cluster portion comprises 3 GalNAc groups and is designated “GalNAc₃”. In certain embodiments, the carbohydrate cluster portion comprises 4 GalNAc groups and is designated “GalNAc₄”. Specific carbohydrate cluster portions (having specific tether, branching and conjugate linker groups) are described herein and designated by Roman numeral followed by subscript “a”. Accordingly “GalNAc3-1ₐ” refers to a specific carbohydrate cluster portion of a conjugate group having 3 GalNAc groups and specifically identified tether, branching and linking groups. Such carbohydrate cluster fragment is attached to an oligomeric compound via a cleavable moiety, such as a cleavable bond or cleavable nucleoside.

[0056] “Conjugate compound” means any atoms, group of atoms, or group of linked atoms suitable for use as a conjugate group. In certain embodiments, conjugate compounds may possess or impart one or more properties, including, but not limited to pharmacodynamic, pharmacokinetic, binding, absorption, cellular distribution, cellular uptake, charge and/or clearance properties.

[0057] “Contiguous nucleobases” means nucleobases immediately adjacent to each other.

[0058] “Constrained ethyl nucleoside” or “cEt” means a nucleoside comprising a bicyclic sugar moiety comprising a 4′-CH(CH₃)—O-2′bridge.

[0059] “Deoxynucleoside” means a nucleoside comprising 2′-H furanosyl sugar moiety, as found in naturally occurring deoxyribonucleosides (DNA). In certain embodiments, a 2′-deoxynucleoside may comprise a modified nucleobase or may comprise an RNA nucleobase (e.g., uracil).

[0060] “Designing” or “Designed to” refer to the process of designing an oligomeric compound that specifically hybridizes with a selected nucleic acid molecule.

[0061] “Differently modified” mean chemical modifications or chemical substituents that are different from one another, including absence of modifications. Thus, for example, a MOE nucleoside and an unmodified DNA nucleoside are “differently modified,” even though the DNA nucleoside is unmodified. Likewise, DNA and RNA are “differently modified,” even though both are naturally-occurring unmodified nucleosides. Nucleosides that are the same but for comprising different nucleobases are not differently modified. For example, a nucleoside comprising a 2′-OMe modified sugar and an unmodified adenine nucleobase and a nucleoside comprising a 2′-OMe modified sugar and an unmodified thymine nucleobase are not differently modified.

[0062] “Diluent” means an ingredient in a composition that lacks pharmacological activity, but is pharmaceutically necessary or desirable. For example, in drugs that are injected, the diluent may be liquid, e.g. saline solution.

[0063] “Dose” means a specified quantity of a pharmaceutical agent provided in a single administration, or in a specified time period. In certain embodiments, a dose may be administered in one, two, or more boluses, tablets, or injections. For example, in certain embodiments, where subcutaneous administration is desired, the desired dose requires a volume not easily accommodated by a single injection, therefore, two or more injections may be used to achieve the desired dose. In certain embodiments, the pharmaceutical agent is administered by infusion over an extended period of time or continuously. Doses may be stated as the amount of pharmaceutical agent per hour, day, week, or month.

[0064] “Double-stranded” refers to two separate oligomeric compounds that are hybridized to one another. Such double stranded compounds may have one or more or non-hybridizing nucleosides at one or both ends of one or both strands (overhangs) and/or one or more internal non-hybridizing nucleosides (mismatches) provided there is sufficient complementarity to maintain hybridization under physiologically relevant conditions.

[0065] “Downstream” refers to the relative direction towards the 3′ end or C-terminal end of a nucleic acid.

[0066] “Effective amount” means the amount of active pharmaceutical agent sufficient to effectuate a desired physiological outcome in an individual in need of the agent. The effective amount may vary among individuals depending on the health and physical condition of the individual to be treated, the taxonomic group of the individuals to be treated, the formulation of the composition, assessment of the individual's medical condition, and other relevant factors.

[0067] “Effective amount” in the context of modulating an activity or of treating or preventing a condition means the administration of that amount of pharmaceutical agent to a subject in need of such modulation, treatment, or prophylaxis, either in a single dose or as part of a series, that is effective for modulation of that effect, or for treatment or prophylaxis or improvement of that condition. The effective amount may vary among individuals depending on the health and physical condition of the individual to be treated, the taxonomic group of the individuals to be treated, the formulation of the composition, assessment of the individual's medical condition, and other relevant factors.

[0068] “Efficacy” means the ability to produce a desired effect.

[0069] “Essentially unchanged” means little or no change in a particular parameter, particularly relative to another parameter which changes much more. In certain embodiments, a parameter is essentially unchanged when it changes less than 5%. In certain embodiments, a parameter is essentially unchanged if it changes less than two-fold while another parameter changes at least ten-fold. For example, in certain embodiments, an antisense activity is a change in the amount of a target nucleic acid. In certain such embodiments, the amount of a non-target nucleic acid is essentially unchanged if it changes much less than the target nucleic acid does, but the change need not be zero.

[0070] “Expression” means the process by which a gene ultimately results in a protein. Expression includes, but is not limited to, transcription, post-transcriptional modification (e.g., splicing, polyadenlyation, addition of 5′-cap), and translation.

[0071] “Fully complementary” or “100% complementary” means each nucleobase of a first nucleic acid has a complementary nucleobase in a second nucleic acid. In certain embodiments, a first nucleic acid is an antisense compound and a target nucleic acid is a second nucleic acid.

[0072] “Furanosyl” means a structure comprising a 5-membered ring comprising four carbon atoms and one oxygen atom.

[0073] “Gapmer” means a chimeric antisense compound in which an internal region having a plurality of nucleosides that support RNase H cleavage is positioned between external regions having one or more nucleosides, wherein the nucleosides comprising the internal region are chemically distinct from the nucleoside or nucleosides comprising the external regions. The internal region may be referred to as the “gap” and the external regions may be referred to as the “wings.”

[0074] “Growth Hormone Receptor (GHR)” means any nucleic acid or protein of GHR. “GHR nucleic acid” means any nucleic acid encoding GHR. For example, in certain embodiments, a GHR nucleic acid includes a DNA sequence encoding GHR, an RNA sequence transcribed from DNA encoding GHR (including genomic DNA comprising introns and exons), including a non-protein encoding (i.e. non-coding) RNA sequence, and an mRNA sequence encoding GHR. “GHR mRNA” means an mRNA encoding a GHR protein.

[0075] “GHR specific inhibitor” refers to any agent capable of specifically inhibiting GHR RNA and/or GHR protein expression or activity at the molecular level. For example, GHR specific inhibitors include nucleic acids (including antisense compounds), peptides, antibodies, small molecules, and other agents capable of inhibiting the expression of GHR RNA and/or GHR protein.

[0076] “Halo” and “halogen,” mean an atom selected from fluorine, chlorine, bromine and iodine.

[0077] “Heteroaryl,” and “heteroaromatic,” mean a radical comprising a mono- or poly-cyclic aromatic ring, ring system or fused ring system wherein at least one of the rings is aromatic and includes one or more heteroatoms. Heteroaryl is also meant to include fused ring systems including systems where one or more of the fused rings contain no heteroatoms. Heteroaryl groups typically include one ring atom selected from sulfur, nitrogen or oxygen. Examples of heteroaryl groups include without limitation, pyridinyl, pyrazinyl, pyrimidinyl, pyrrolyl, pyrazolyl, imidazolyl, thiazolyl, oxazolyl, isooxazolyl, thiadiazolyl, oxadiazolyl, thiophenyl, furanyl, quinolinyl, isoquinolinyl, benzimidazolyl, benzooxazolyl, quinoxalinyl and the like. Heteroaryl radicals can be attached to a parent molecule directly or through a linking moiety such as an aliphatic group or hetero atom. Heteroaryl groups as used herein may optionally include further substituent groups.

[0078] “Hybridization” means the annealing of complementary nucleic acid molecules. In certain embodiments, complementary nucleic acid molecules include, but are not limited to, an antisense compound and a nucleic acid target. In certain embodiments, complementary nucleic acid molecules include, but are not limited to, an antisense oligonucleotide and a nucleic acid target.

[0079] “Identifying an animal having, or at risk for having, a disease, disorder and/or condition” means identifying an animal having been diagnosed with the disease, disorder and/or condition or identifying an animal predisposed to develop the disease, disorder and/or condition. Such identification may be accomplished by any method including evaluating an individual's medical history and standard clinical tests or assessments.

[0080] “Immediately adjacent” means there are no intervening elements between the immediately adjacent elements.

[0081] “Individual” means a human or non-human animal selected for treatment or therapy.

[0082] “Inhibiting the expression or activity” refers to a reduction, blockade of the expression or activity and does not necessarily indicate a total elimination of expression or activity.

[0083] “Internucleoside linkage” refers to the chemical bond between nucleosides.

[0084] “Internucleoside neutral linking group” means a neutral linking group that directly links two nucleosides.

[0085] “Internucleoside phosphorus linking group” means a phosphorus linking group that directly links two nucleosides.

[0086] “Lengthened” antisense oligonucleotides are those that have one or more additional nucleosides relative to an antisense oligonucleotide disclosed herein.

[0087] “Linkage motif” means a pattern of linkage modifications in an oligonucleotide or region thereof. The nucleosides of such an oligonucleotide may be modified or unmodified. Unless otherwise indicated, motifs herein describing only linkages are intended to be linkage motifs. Thus, in such instances, the nucleosides are not limited.

[0088] “Linked deoxynucleoside” means a nucleic acid base (A, G, C, T, U) substituted by deoxyribose linked by a phosphate ester to form a nucleotide.

[0089] “Linked nucleosides” means adjacent nucleosides linked together by an internucleoside linkage.

[0090] “Locked nucleic acid nucleoside” or “LNA” “Locked nucleic acid” or “LNA” or “LNA nucleosides” means nucleic acid monomers having a bridge connecting two carbon atoms between the 4′ and 2′position of the nucleoside sugar unit, thereby forming a bicyclic sugar. Examples of such bicyclic sugar include, but are not limited to A) α-L-Methyleneoxy (4′-CH₂—O-2′) LNA, (B) β-D-Methyleneoxy (4′-CH₂—O-2′) LNA, (C) Ethyleneoxy (4′-(CH₂)₂—O-2′) LNA, (D) Aminooxy (4′-CH₂—O—N(R)-2′) LNA and (E) Oxyamino (4′-CH₂—N(R)—O-2′) LNA, as depicted below.

[chemical structure]

[0091] As used herein, LNA compounds include, but are not limited to, compounds having at least one bridge between the 4′ and the 2′ position of the sugar wherein each of the bridges independently comprises 1 or from 2 to 4 linked groups independently selected from —[C(R₁)(R₂)]ₙ—, —C(R₁)═C(R₂)—, —C(R₁)═N—, —C(═NR₁)—, —C(═O)—, —C(═S)—, —O—, —Si(R₁)₂—, —S(═O)_{X} and —N(R₁)—; wherein: x is 0, 1, or 2; n is 1, 2, 3, or 4; each R₁ and R₂ is, independently, H, a protecting group, hydroxyl, C₁-C₁₂ alkyl, substituted C₁-C₁₂ alkyl, C₂-C₁₂ alkenyl, substituted C₂-C₁₂ alkenyl, C₂-C₁₂ alkynyl, substituted C₂-C₁₂ alkynyl, C₅-C₂₀ aryl, substituted C₅-C₂₀ aryl, a heterocycle radical, a substituted heterocycle radical, heteroaryl, substituted heteroaryl, C₅-C₇ alicyclic radical, substituted C₅-C₇ alicyclic radical, halogen, OJ₁, NJ₁J₂, SJ₁, N₃, COM, acyl (C(═O)—H), substituted acyl, CN, sulfonyl (S(═O)₂-J₁), or sulfoxyl (S(═O)-J₁); and each J₁ and J₂ is, independently, H, C₁-C₁₂ alkyl, substituted C₁-C₁₂ alkyl, C₂-C₁₂ alkenyl, substituted C₂-C₁₂ alkenyl, C₂-C₁₂ alkynyl, substituted C₂-C₁₂ alkynyl, C₅-C₂₀ aryl, substituted C₅-C₂₀ aryl, acyl (C(═O)—H), substituted acyl, a heterocycle radical, a substituted heterocycle radical, C₁-C₁₂ aminoalkyl, substituted C₁-C₁₂ aminoalkyl or a protecting group.

[0092] Examples of 4′-2′ bridging groups encompassed within the definition of LNA include, but are not limited to one of formulae: —[C(R₁)(R₂)]ₙ—, —[C(R₁)(R₂)]ₙ—O—, —C(R₁R₂)—N(R₁)—O— or —C(R₁R₂)—O—N(R₁)—. Furthermore, other bridging groups encompassed with the definition of LNA are 4′-CH₂-2′,4′-(CH₂)₂-2′,4′-(CH₂)₃-2′,4′-CH₂—O-2′,4′-(CH₂)₂—O-2′,4′-CH₂—O—N(R₁)-2′ and 4′-CH₂—N(R₁)—O-2′-bridges, wherein each R₁ and R₂ is, independently, H, a protecting group or C₁-C₁₂ alkyl.

[0093] Also included within the definition of LNA according to the invention are LNAs in which the 2′-hydroxyl group of the ribosyl sugar ring is connected to the 4′ carbon atom of the sugar ring, thereby forming a methyleneoxy (4′-CH₂—O-2′) bridge to form the bicyclic sugar moiety. The bridge can also be a methylene (—CH₂—) group connecting the 2′ oxygen atom and the 4′ carbon atom, for which the term methyleneoxy (4′-CH₂—O-2′) LNA is used. Furthermore; in the case of the bicyclic sugar moiety having an ethylene bridging group in this position, the term ethyleneoxy (4′-CH₂CH₂—O-2′) LNA is used. α-L-methyleneoxy (4′-CH₂—O-2′), an isomer of methyleneoxy (4′-CH₂—O-2′) LNA is also encompassed within the definition of LNA, as used herein.

[0094] “Metabolic disorder” means a disease or condition principally characterized by dysregulation of metabolism—the complex set of chemical reactions associated with breakdown of food to produce energy.

[0095] “Mismatch” or “non-complementary nucleobase” refers to the case when a nucleobase of a first nucleic acid is not capable of pairing with the corresponding nucleobase of a second or target nucleic acid.

[0096] “Modified carbohydrate” means any carbohydrate having one or more chemical modifications relative to naturally occurring carbohydrates.

[0097] “Modified internucleoside linkage” refers to a substitution or any change from a naturally occurring internucleoside bond (i.e. a phosphodiester internucleoside bond).

[0098] “Modified nucleobase” means any nucleobase other than adenine, cytosine, guanine, thymidine, or uracil. An “unmodified nucleobase” means the purine bases adenine (A) and guanine (G), and the pyrimidine bases thymine (T), cytosine (C) and uracil (U).

[0099] “Modified nucleoside” means a nucleoside having, independently, a modified sugar moiety and/or modified nucleobase.

[0100] “Modified nucleotide” means a nucleotide having, independently, a modified sugar moiety, modified internucleoside linkage, or modified nucleobase.

[0101] “Modified oligonucleotide” means an oligonucleotide comprising at least one modified internucleoside linkage, a modified sugar, and/or a modified nucleobase.

[0102] “Modified sugar” means substitution and/or any change from a natural sugar moiety. “Modified sugar moiety” means a substituted sugar moiety or a sugar surrogate.

[0103] “Modulating” refers to changing or adjusting a feature in a cell, tissue, organ or organism. For example, modulating GHR mRNA can mean to increase or decrease the level of GHR mRNA and/or GHR protein in a cell, tissue, organ or organism. A “modulator” effects the change in the cell, tissue, organ or organism. For example, a GHR antisense compound can be a modulator that decreases the amount of GHR mRNA and/or GHR protein in a cell, tissue, organ or organism.

[0104] “MOE” means —OCH₂CH₂OCH₃.

[0105] “Monomer” refers to a single unit of an oligomer. Monomers include, but are not limited to, nucleosides and nucleotides, whether naturally occurring or modified.

[0106] “Mono or polycyclic ring system” is meant to include all ring systems selected from single or polycyclic radical ring systems wherein the rings are fused or linked and is meant to be inclusive of single and mixed ring systems individually selected from aliphatic, alicyclic, aryl, heteroaryl, aralkyl, arylalkyl, heterocyclic, heteroaryl, heteroaromatic and heteroarylalkyl. Such mono and poly cyclic structures can contain rings that each have the same level of saturation or each, independently, have varying degrees of saturation including fully saturated, partially saturated or fully unsaturated. Each ring can comprise ring atoms selected from C, N, O and S to give rise to heterocyclic rings as well as rings comprising only C ring atoms which can be present in a mixed motif such as for example benzimidazole wherein one ring has only carbon ring atoms and the fused ring has two nitrogen atoms. The mono or polycyclic ring system can be further substituted with substituent groups such as for example phthalimide which has two ═O groups attached to one of the rings. Mono or polycyclic ring systems can be attached to parent molecules using various strategies such as directly through a ring atom, fused through multiple ring atoms, through a substituent group or through a bifunctional linking moiety.

[0107] “Motif” means the pattern of unmodified and modified nucleosides in an antisense compound.

[0108] “Natural sugar moiety” means a sugar moiety found in DNA (2′-H) or RNA (2′-OH). “Naturally occurring sugar moiety” means a ribofuranosyl as found in naturally occurring RNA or a deoxyribofuranosyl as found in naturally occurring DNA.

[0109] “Naturally occurring internucleoside linkage” means a 3′ to 5′ phosphodiester linkage.

[0110] “Neutral linking group” means a linking group that is not charged. Neutral linking groups include without limitation phosphotriesters, methylphosphonates, MMI (—CH₂—N(CH₃)—O—), amide-3 (—CH₂—C(═O)—N(H)—), amide-4 (—CH₂—N(H)—C(═O)—), formacetal (—O—CH₂—O—), and thioformacetal (—S—CH₂—O—). Further neutral linking groups include nonionic linkages comprising siloxane (dialkylsiloxane), carboxylate ester, carboxamide, sulfide, sulfonate ester and amides (See for example: Carbohydrate Modifications in Antisense Research; Y. S. Sanghvi and P. D. Cook Eds. ACS Symposium Series 580; Chapters 3 and 4, (pp. 40-65)). Further neutral linking groups include nonionic linkages comprising mixed N, O, S and CH₂ component parts.

[0111] “Non-complementary nucleobase” refers to a pair of nucleobases that do not form hydrogen bonds with one another or otherwise support hybridization.

[0112] “Non-internucleoside neutral linking group” means a neutral linking group that does not directly link two nucleosides. In certain embodiments, a non-internucleoside neutral linking group links a nucleoside to a group other than a nucleoside. In certain embodiments, a non-internucleoside neutral linking group links two groups, neither of which is a nucleoside.

[0113] “Non-internucleoside phosphorus linking group” means a phosphorus linking group that does not directly link two nucleosides. In certain embodiments, a non-internucleoside phosphorus linking group links a nucleoside to a group other than a nucleoside. In certain embodiments, a non-internucleoside phosphorus linking group links two groups, neither of which is a nucleoside.

[0114] “Nucleic acid” refers to molecules composed of monomeric nucleotides. A nucleic acid includes, but is not limited to, ribonucleic acids (RNA), deoxyribonucleic acids (DNA), single-stranded nucleic acids, and double-stranded nucleic acids.

[0115] “Nucleobase” means a heterocyclic moiety capable of pairing with a base of another nucleic acid.

[0116] “Nucleobase complementarity” or “complementarity” when in reference to nucleobases means a nucleobase that is capable of base pairing with another nucleobase. For example, in DNA, adenine (A) is complementary to thymine (T). For example, in RNA, adenine (A) is complementary to uracil (U). In certain embodiments, complementary nucleobase means a nucleobase of an antisense compound that is capable of base pairing with a nucleobase of its target nucleic acid. For example, if a nucleobase at a certain position of an antisense compound is capable of hydrogen bonding with a nucleobase at a certain position of a target nucleic acid, then the position of hydrogen bonding between the oligonucleotide and the target nucleic acid is considered to be complementary at that nucleobase pair. Nucleobases comprising certain modifications may maintain the ability to pair with a counterpart nucleobase and thus, are still capable of nucleobase complementarity.

[0117] “Nucleobase modification motif” means a pattern of modifications to nucleobases along an oligonucleotide. Unless otherwise indicated, a nucleobase modification motif is independent of the nucleobase sequence.

[0118] “Nucleobase sequence” means the order of contiguous nucleobases independent of any sugar, linkage, and/or nucleobase modification.

[0119] “Nucleoside” means a compound comprising a nucleobase moiety and a sugar moiety. Nucleosides include, but are not limited to, naturally occurring nucleosides (as found in DNA and RNA) and modified nucleosides. Nucleosides may be linked to a phosphate moiety.

[0120] “Nucleoside mimetic” includes those structures used to replace the sugar or the sugar and the base and not necessarily the linkage at one or more positions of an oligomeric compound such as for example nucleoside mimetics having morpholino, cyclohexenyl, cyclohexyl, tetrahydropyranyl, bicyclo or tricyclo sugar mimetics, e.g., non furanose sugar units. Nucleotide mimetic includes those structures used to replace the nucleoside and the linkage at one or more positions of an oligomeric compound such as for example peptide nucleic acids or morpholinos (morpholinos linked by —N(H)—C(═O)—O— or other non-phosphodiester linkage). Sugar surrogate overlaps with the slightly broader term nucleoside mimetic but is intended to indicate replacement of the sugar unit (furanose ring) only. The tetrahydropyranyl rings provided herein are illustrative of an example of a sugar surrogate wherein the furanose sugar group has been replaced with a tetrahydropyranyl ring system. “Mimetic” refers to groups that are substituted for a sugar, a nucleobase, and/or internucleoside linkage. Generally, a mimetic is used in place of the sugar or sugar-internucleoside linkage combination, and the nucleobase is maintained for hybridization to a selected target.

[0121] “Nucleoside motif” means a pattern of nucleoside modifications in an oligonucleotide or a region thereof. The linkages of such an oligonucleotide may be modified or unmodified. Unless otherwise indicated, motifs herein describing only nucleosides are intended to be nucleoside motifs. Thus, in such instances, the linkages are not limited.

[0122] “Nucleotide” means a nucleoside having a phosphate group covalently linked to the sugar portion of the nucleoside.

[0123] “Off-target effect” refers to an unwanted or deleterious biological effect associated with modulation of RNA or protein expression of a gene other than the intended target nucleic acid.

[0124] “Oligomeric compound” means a polymeric structure comprising two or more sub-structures. In certain embodiments, an oligomeric compound comprises an oligonucleotide. In certain embodiments, an oligomeric compound comprises one or more conjugate groups and/or terminal groups. In certain embodiments, an oligomeric compound consists of an oligonucleotide. Oligomeric compounds also include naturally occurring nucleic acids. In certain embodiments, an oligomeric compound comprises a backbone of one or more linked monomeric subunits where each linked monomeric subunit is directly or indirectly attached to a heterocyclic base moiety. In certain embodiments, oligomeric compounds may also include monomeric subunits that are not linked to a heterocyclic base moiety, thereby providing abasic sites. In certain embodiments, the linkages joining the monomeric subunits, the sugar moieties or surrogates and the heterocyclic base moieties can be independently modified. In certain embodiments, the linkage-sugar unit, which may or may not include a heterocyclic base, may be substituted with a mimetic such as the monomers in peptide nucleic acids.

[0125] “Oligonucleoside” means an oligonucleotide in which the internucleoside linkages do not contain a phosphorus atom.

[0126] “Oligonucleotide” means a polymer of linked nucleosides each of which can be modified or unmodified, independent one from another.

[0127] “Parenteral administration” means administration through injection or infusion. Parenteral administration includes subcutaneous administration, intravenous administration, intramuscular administration, intraarterial administration, intraperitoneal administration, or intracranial administration, e.g. intrathecal or intracerebroventricular administration.

[0128] “Peptide” means a molecular formed by linking at least two amino acids by amide bonds. Without limitation, as used herein, peptide refers to polypeptides and proteins.

[0129] “Pharmaceutical agent” means a substance that provides a therapeutic benefit when administered to an individual. For example, in certain embodiments, a conjugated antisense oligonucleotide targeted to GHR is a pharmaceutical agent.

[0130] “Pharmaceutical composition” means a mixture of substances suitable for administering to an individual. For example, a pharmaceutical composition may comprise one or more active pharmaceutical agents and a sterile aqueous solution.

[0131] “Pharmaceutically acceptable salts” means physiologically and pharmaceutically acceptable salts of antisense compounds, i.e., salts that retain the desired biological activity of the parent oligonucleotide and do not impart undesired toxicological effects thereto.

[0132] “Phosphorus linking group” means a linking group comprising a phosphorus atom. Phosphorus linking groups include without limitation groups having the formula:

[chemical structure]

wherein:

[0133] Rₐ and R_{d} are each, independently, O, S, CH₂, NH, or NJ₁ wherein J₁ is C₁-C₆ alkyl or substituted C₁-C₆ alkyl;

[0134] R_{b} is O or S;

[0135] R_{c} is OH, SH, C₁-C₆ alkyl, substituted C₁-C₆ alkyl, C₁-C₆ alkoxy, substituted C₁-C₆ alkoxy, amino or substituted amino; and

[0136] J₁ is R_{b} is O or S.

Phosphorus linking groups include without limitation, phosphodiester, phosphorothioate, phosphorodithioate, phosphonate, phosphoramidate, phosphorothioamidate, thionoalkylphosphonate, phosphotriesters, thionoalkylphosphotriester and boranophosphate.

[0137] “Phosphorothioate linkage” means a linkage between nucleosides where the phosphodiester bond is modified by replacing one of the non-bridging oxygen atoms with a sulfur atom. A phosphorothioate linkage is a modified internucleoside linkage.

[0138] “Portion” means a defined number of contiguous (i.e., linked) nucleobases of a nucleic acid. In certain embodiments, a portion is a defined number of contiguous nucleobases of a target nucleic acid. In certain embodiments, a portion is a defined number of contiguous nucleobases of an antisense compound

[0139] “Prevent” refers to delaying or forestalling the onset, development or progression of a disease, disorder, or condition for a period of time from minutes to indefinitely. Prevent also means reducing the risk of developing a disease, disorder, or condition.

[0140] “Prodrug” means an inactive or less active form of a compound which, when administered to a subject, is metabolized to form the active, or more active, compound (e.g., drug).

[0141] “Prophylactically effective amount” refers to an amount of a pharmaceutical agent that provides a prophylactic or preventative benefit to an animal.

[0142] “Protecting group” means any compound or protecting group known to those having skill in the art. Non-limiting examples of protecting groups may be found in “Protective Groups in Organic Chemistry”, T. W. Greene, P. G. M. Wuts, ISBN 0-471-62301-6, John Wiley & Sons, Inc, New York, which is incorporated herein by reference in its entirety.

[0143] “Region” is defined as a portion of the target nucleic acid having at least one identifiable structure, function, or characteristic.

[0144] “Ribonucleotide” means a nucleotide having a hydroxy at the 2′ position of the sugar portion of the nucleotide. Ribonucleotides may be modified with any of a variety of substituents.

[0145] “RISC based antisense compound” means an antisense compound wherein at least some of the antisense activity of the antisense compound is attributable to the RNA Induced Silencing Complex (RISC).

[0146] “RNase H based antisense compound” means an antisense compound wherein at least some of the antisense activity of the antisense compound is attributable to hybridization of the antisense compound to a target nucleic acid and subsequent cleavage of the target nucleic acid by RNase H.

[0147] “Salts” mean a physiologically and pharmaceutically acceptable salt of antisense compounds, i.e., salts that retain the desired biological activity of the parent oligonucleotide and do not impart undesired toxicological effects thereto.

[0148] “Segments” are defined as smaller or sub-portions of regions within a target nucleic acid.

[0149] “Separate regions” means portions of an oligonucleotide wherein the chemical modifications or the motif of chemical modifications of any neighboring portions include at least one difference to allow the separate regions to be distinguished from one another.

[0150] “Sequence motif” means a pattern of nucleobases arranged along an oligonucleotide or portion thereof. Unless otherwise indicated, a sequence motif is independent of chemical modifications and thus may have any combination of chemical modifications, including no chemical modifications.

[0151] “Side effects” means physiological disease and/or conditions attributable to a treatment other than the desired effects. In certain embodiments, side effects include injection site reactions, liver function test abnormalities, renal function abnormalities, liver toxicity, renal toxicity, central nervous system abnormalities, myopathies, and malaise. For example, increased aminotransferase levels in serum may indicate liver toxicity or liver function abnormality. For example, increased bilirubin may indicate liver toxicity or liver function abnormality.

[0152] “Single-stranded” means an oligomeric compound that is not hybridized to its complement and which lacks sufficient self-complementarity to form a stable self-duplex.

[0153] “Sites,” as used herein, are defined as unique nucleobase positions within a target nucleic acid.

[0154] “Slows progression” means decrease in the development of the said disease.

[0155] “Specifically hybridizable” refers to an antisense compound having a sufficient degree of complementarity between an antisense oligonucleotide and a target nucleic acid to induce a desired effect, while exhibiting minimal or no effects on non-target nucleic acids under conditions in which specific binding is desired, i.e., under physiological conditions in the case of in vivo assays and therapeutic treatments.

[0156] “Stringent hybridization conditions” or “stringent conditions” refer to conditions under which an oligomeric compound will hybridize to its target sequence, but to a minimal number of other sequences.

[0157] “Subject” means a human or non-human animal selected for treatment or therapy.

[0158] “Substituent” and “substituent group,” means an atom or group that replaces the atom or group of a named parent compound. For example a substituent of a modified nucleoside is any atom or group that differs from the atom or group found in a naturally occurring nucleoside (e.g., a modified 2′-substituent is any atom or group at the 2′-position of a nucleoside other than H or OH). Substituent groups can be protected or unprotected. In certain embodiments, compounds of the present disclosure have substituents at one or at more than one position of the parent compound. Substituents may also be further substituted with other substituent groups and may be attached directly or via a linking group such as an alkyl or hydrocarbyl group to a parent compound.

[0159] Likewise, as used herein, “substituent” in reference to a chemical functional group means an atom or group of atoms that differs from the atom or a group of atoms normally present in the named functional group. In certain embodiments, a substituent replaces a hydrogen atom of the functional group (e.g., in certain embodiments, the substituent of a substituted methyl group is an atom or group other than hydrogen which replaces one of the hydrogen atoms of an unsubstituted methyl group). Unless otherwise indicated, groups amenable for use as substituents include without limitation, halogen, hydroxyl, alkyl, alkenyl, alkynyl, acyl (—C(O)Rₐₐ), carboxyl (—C(O)O—Rₐₐ), aliphatic groups, alicyclic groups, alkoxy, substituted oxy (—O—Rₐₐ), aryl, aralkyl, heterocyclic radical, heteroaryl, heteroarylalkyl, amino (—N(R_{bb})(R_{cc})), imino(=NR_{bb}), amido (—C(O)N(R_{bb})(R_{cc}) or —N(R_{bb})C(O)Rₐₐ), azido (—N₃), nitro (—NO₂), cyano (—CN), carbamido (—OC(O)N(R_{bb})(R_{cc}) or —N(R_{bb})C(O)ORₐₐ)), ureido (—N(R_{bb})C(O)N(R_{bb})(R_{cc})), thioureido (—N(R_{bb})C(S)N(R_{bb})—(R_{cc})), guanidinyl (—N(R_{bb})C(═NR_{bb})N(R_{bb})(R_{cc})), amidinyl (—C(═NR_{bb})N(R_{bb})(R_{cc}) or —N(R_{bb})C(═NR_{bb})(Rₐₐ)), thiol (—SR_{bb}), sulfinyl (—S(O)R_{bb}), sulfonyl (—S(O)₂R_{bb}) and sulfonamidyl (—S(O)₂N(R_{bb})(R_{cc}) or —N(R_{bb})S—(O)₂R_{bb}). Wherein each Rₐₐ, R_{bb} and R_{cc} is, independently, H, an optionally linked chemical functional group or a further substituent group with a preferred list including without limitation, alkyl, alkenyl, alkynyl, aliphatic, alkoxy, acyl, aryl, aralkyl, heteroaryl, alicyclic, heterocyclic and heteroarylalkyl. Selected substituents within the compounds described herein are present to a recursive degree.

[0160] “Substituted sugar moiety” means a furanosyl that is not a naturally occurring sugar moiety. Substituted sugar moieties include, but are not limited to furanosyls comprising substituents at the 2′-position, the 3′-position, the 5′-position and/or the 4′-position. Certain substituted sugar moieties are bicyclic sugar moieties.

[0161] “Sugar moiety” means a naturally occurring sugar moiety or a modified sugar moiety of a nucleoside.

[0162] “Sugar motif” means a pattern of sugar modifications in an oligonucleotide or a region thereof.

[0163] “Sugar surrogate” means a structure that does not comprise a furanosyl and that is capable of replacing the naturally occurring sugar moiety of a nucleoside, such that the resulting nucleoside sub-units are capable of linking together and/or linking to other nucleosides to form an oligomeric compound which is capable of hybridizing to a complementary oligomeric compound. Such structures include rings comprising a different number of atoms than furanosyl (e.g., 4, 6, or 7-membered rings); replacement of the oxygen of a furanosyl with a non-oxygen atom (e.g., carbon, sulfur, or nitrogen); or both a change in the number of atoms and a replacement of the oxygen. Such structures may also comprise substitutions corresponding to those described for substituted sugar moieties (e.g., 6-membered carbocyclic bicyclic sugar surrogates optionally comprising additional substituents). Sugar surrogates also include more complex sugar replacements (e.g., the non-ring systems of peptide nucleic acid). Sugar surrogates include without limitation morpholinos, cyclohexenyls and cyclohexitols.

[0164] “Target” refers to a protein, the modulation of which is desired.

[0165] “Target gene” refers to a gene encoding a target.

[0166] “Targeting” or “targeted” means the process of design and selection of an antisense compound that will specifically hybridize to a target nucleic acid and induce a desired effect.

[0167] “Target nucleic acid,” “target RNA,” “target RNA transcript” and “nucleic acid target” all mean a nucleic acid capable of being targeted by antisense compounds. “Target nucleic acid” means a nucleic acid molecule to which an antisense compound is intended to hybridize to result in a desired antisense activity. Antisense oligonucleotides have sufficient complementarity to their target nucleic acids to allow hybridization under physiological conditions.

[0168] “Target region” means a portion of a target nucleic acid to which one or more antisense compounds is targeted.

[0169] “Target segment” means the sequence of nucleotides of a target nucleic acid to which an antisense compound is targeted. “5′ target site” refers to the 5′-most nucleotide of a target segment. “3′ target site” refers to the 3′-most nucleotide of a target segment.

[0170] “Terminal group” means one or more atom attached to either, or both, the 3′ end or the 5′ end of an oligonucleotide. In certain embodiments a terminal group is a conjugate group. In certain embodiments, a terminal group comprises one or more terminal group nucleosides.

[0171] “Terminal internucleoside linkage” means the linkage between the last two nucleosides of an oligonucleotide or defined region thereof.

[0172] “Therapeutically effective amount” means an amount of a pharmaceutical agent that provides a therapeutic benefit to an individual.

[0173] “The same type of modifications” refers to modifications that are the same as one another, including absence of modifications. Thus, for example, two unmodified DNA nucleosides have “the same type of modification,” even though the DNA nucleoside is unmodified. Such nucleosides having the same type modification may comprise different nucleobases.

[0174] “Treat” refers to administering a pharmaceutical composition to an animal in order to effect an alteration or improvement of a disease, disorder, or condition in the animal. In certain embodiments, one or more pharmaceutical compositions can be administered to the animal.

[0175] “Type of modification” in reference to a nucleoside or a nucleoside of a “type” means the chemical modification of a nucleoside and includes modified and unmodified nucleosides. Accordingly, unless otherwise indicated, a “nucleoside having a modification of a first type” may be an unmodified nucleoside.

[0176] “Unmodified” nucleobases or “naturally occurring nucleobase” means the naturally occurring heterocyclic nucleobases of RNA or DNA: the purine bases adenine (A) and guanine (G), and the pyrimidine bases thymine (T), cytosine (C) (including 5-methyl C), and uracil (U).

[0177] “Unmodified nucleotide” means a nucleotide composed of naturally occurring nucleobases, sugar moieties, and internucleoside linkages. In certain embodiments, an unmodified nucleotide is an RNA nucleotide (i.e. β-D-ribonucleosides) or a DNA nucleotide (i.e. β-D-deoxyribonucleoside).

[0178] “Upstream” refers to the relative direction towards the 5′ end or N-terminal end of a nucleic acid.

[0179] “Wing segment” means a plurality of nucleosides modified to impart to an oligonucleotide properties such as enhanced inhibitory activity, increased binding affinity for a target nucleic acid, or resistance to degradation by in vivo nucleases.

### Certain Embodiments

[0180] Certain embodiments provide methods, compounds and compositions for inhibiting growth hormone receptor (GHR) expression.

[0181] Certain embodiments provide antisense compounds targeted to a GHR nucleic acid. In certain embodiments, the GHR nucleic acid has the sequence set forth in GENBANK Accession No. NM_000163.4 (incorporated herein as SEQ ID NO: 1), GENBANK Accession No. NT_006576.16 truncated from nucleotides 42411001 to 42714000 (incorporated herein as SEQ ID NO: 2), GENBANK Accession No X06562.1 (incorporated herein as SEQ ID NO: 3), GENBANK Accession No. DR006395.1 (incorporated herein as SEQ ID NO: 4), GENBANK Accession No. DB052048.1 (incorporated herein as SEQ ID NO: 5), GENBANK Accession No. AF230800.1 (incorporated herein as SEQ ID NO: 6), the complement of GENBANK Accession No. AA398260.1 (incorporated herein as SEQ ID NO: 7), GENBANK Accession No. BC136496.1 (incorporated herein as SEQ ID NO: 8), GENBANK Accession No. NM_001242399.2 (incorporated herein as SEQ ID NO: 9), GENBANK Accession No. NM_001242400.2 (incorporated herein as SEQ ID NO: 10), GENBANK Accession No. NM_001242401.3 (incorporated herein as SEQ ID NO: 11), GENBANK Accession No. NM_001242402.2 (incorporated herein as SEQ ID NO: 12), GENBANK Accession No. NM_001242403.2 (incorporated herein as SEQ ID NO: 13), GENBANK Accession No. NM_001242404.2 (incorporated herein as SEQ ID NO: 14), GENBANK Accession No. NM_001242405.2 (incorporated herein as SEQ ID NO: 15), GENBANK Accession No. NM_001242406.2 (incorporated herein as SEQ ID NO: 16), GENBANK Accession No. NM_001242460.1 (incorporated herein as SEQ ID NO: 17), GENBANK Accession NM_001242461.1 (incorporated herein as SEQ ID NO: 18), or GENBANK Accession No. NM_001242462.1 (incorporated herein as SEQ ID NO: 19).

[0182] Certain embodiments provide a compound comprising a modified oligonucleotide and a conjugate group, wherein the modified oligonucleotide consists of 10 to 30 linked nucleosides and has a nucleobase sequence comprising at least 8 contiguous nucleobases of any of the nucleobase sequences of SEQ ID NOs: 20-2295.

[0183] Certain embodiments provide a compound comprising a modified oligonucleotide and a conjugate group, wherein the modified oligonucleotide consists of 10 to 30 linked nucleosides and has a nucleobase sequence comprising at least 9 contiguous nucleobases of any of the nucleobase sequences of SEQ ID NOs: 20-2295.

[0184] Certain embodiments provide a compound comprising a modified oligonucleotide and a conjugate group, wherein the modified oligonucleotide consists of 10 to 30 linked nucleosides and has a nucleobase sequence comprising at least 10 contiguous nucleobases of the nucleobase sequences of any of SEQ ID NOs: 20-2295.

[0185] Certain embodiments provide a compound comprising a modified oligonucleotide and a conjugate group, wherein the modified oligonucleotide consists of 10 to 30 linked nucleosides and has a nucleobase sequence comprising at least 11 contiguous nucleobases of the nucleobase sequences of any of SEQ ID NOs: 20-2295.

[0186] Certain embodiments provide a compound comprising a modified oligonucleotide and a conjugate group, wherein the modified oligonucleotide consists of 10 to 30 linked nucleosides and has a nucleobase sequence comprising at least 12 contiguous nucleobases of the nucleobase sequences of any of SEQ ID NOs: 20-2295.

[0187] Certain embodiments provide a compound comprising a modified oligonucleotide and a conjugate group, wherein the modified oligonucleotide consists of 10 to 30 linked nucleosides and has a nucleobase sequence comprising the nucleobase sequences of any of SEQ ID NOs: 20-2295.

[0188] Certain embodiments provide a compound comprising a modified oligonucleotide and a conjugate group, wherein the modified oligonucleotide consists of the nucleobase sequences of any one of SEQ ID NOs: 20-2295.

[0189] Certain embodiments provide a compound comprising a modified oligonucleotide and a conjugate group, wherein the modified oligonucleotide consists of 10 to 30 linked nucleosides complementary within nucleotides 30-51, 63-82, 103-118, 143-159, 164-197, 206-259, 361-388, 554-585, 625-700, 736-776, 862-887, 923-973, 978-996, 1127-1142, 1170-1195, 1317-1347, 1360-1383, 1418-1449, 1492-1507, 1524-1548, 1597-1634, 1641-1660, 1683-1698, 1744-1768, 1827-1860, 1949-2002, 2072-2092, 2095-2110, 2306-2321, 2665-2683, 2685-2719, 2739-2770, 2859-2880, 2941-2960, 2963-2978, 3037-3052, 3205-3252, 3306-3332, 3371-3386, 3518-3542, 3975-3990, 4041-4087, 4418-4446, 4528-4546, 7231-7246, 7570-7585, 8395-8410, 9153-9168, 9554-9569, 9931-9946, 10549-10564, 11020-11035, 11793-11808, 12214-12229, 12474-12489, 12905-12920, 13400-13415, 13717-13732, 14149-14164, 14540-14555, 15264-15279, 15849-15864, 16530-16545, 17377-17392, 17581-17596, 17943-17958, 18353-18368, 18636-18651, 19256-19271, 19814-19829, 20365-20380, 20979-20994, 21566-21581, 22150-22165, 22803-22818, 29049-29064, 29554-29569, 30245-30260, 30550-30565, 30915-30930, 31468-31483, 32366-32381, 32897-32912, 33187-33202, 33780-33795, 34407-34422, 34846-34861, 35669-35684, 36312-36327, 36812-36827, 37504-37519, 38841-38856, 40250-40265, 40706-40721, 40922-40937, 41424-41439, 41999-42014, 42481-42496, 42700-42715, 43291-43306, 43500-43515, 43947-43962, 44448-44463, 45162-45177, 46010-46025, 46476-46491, 47447-47462, 47752-47767, 48001-48016, 48423-48438, 50195-50210, 50470-50485, 51104-51119, 51756-51771, 52015-52030, 52230-52245, 52588-52603, 53532-53547, or 54645-54660 of SEQ ID NO: 1, wherein said modified oligonucleotide is at least 90% complementary to SEQ ID NO: 1.

[0190] Certain embodiments provide a compound comprising a modified oligonucleotide and a conjugate group, wherein the modified oligonucleotide consists of 10 to 30 linked nucleosides having a nucleobase sequence comprising a portion of at least 8 contiguous nucleobases 100% complementary to an equal length portion of nucleobases 30-51, 63-82, 103-118, 143-159, 164-197, 206-259, 361-388, 554-585, 625-700, 736-776, 862-887, 923-973, 978-996, 1127-1142, 1170-1195, 1317-1347, 1360-1383, 1418-1449, 1492-1507, 1524-1548, 1597-1634, 1641-1660, 1683-1698, 1744-1768, 1827-1860, 1949-2002, 2072-2092, 2095-2110, 2306-2321, 2665-2683, 2685-2719, 2739-2770, 2859-2880, 2941-2960, 2963-2978, 3037-3052, 3205-3252, 3306-3332, 3371-3386, 3518-3542, 3975-3990, 4041-4087, 4418-4446, 4528-4546, 7231-7246, 7570-7585, 8395-8410, 9153-9168, 9554-9569, 9931-9946, 10549-10564, 11020-11035, 11793-11808, 12214-12229, 12474-12489, 12905-12920, 13400-13415, 13717-13732, 14149-14164, 14540-14555, 15264-15279, 15849-15864, 16530-16545, 17377-17392, 17581-17596, 17943-17958, 18353-18368, 18636-18651, 19256-19271, 19814-19829, 20365-20380, 20979-20994, 21566-21581, 22150-22165, 22803-22818, 29049-29064, 29554-29569, 30245-30260, 30550-30565, 30915-30930, 31468-31483, 32366-32381, 32897-32912, 33187-33202, 33780-33795, 34407-34422, 34846-34861, 35669-35684, 36312-36327, 36812-36827, 37504-37519, 38841-38856, 40250-40265, 40706-40721, 40922-40937, 41424-41439, 41999-42014, 42481-42496, 42700-42715, 43291-43306, 43500-43515, 43947-43962, 44448-44463, 45162-45177, 46010-46025, 46476-46491, 47447-47462, 47752-47767, 48001-48016, 48423-48438, 50195-50210, 50470-50485, 51104-51119, 51756-51771, 52015-52030, 52230-52245, 52588-52603, 53532-53547, or 54645-54660 of SEQ ID NO: 1, wherein the nucleobase sequence of the modified oligonucleotide is complementary to SEQ ID NO: 1.

[0191] Certain embodiments provide a compound comprising a modified oligonucleotide and a conjugate group, wherein the modified oligonucleotide consists of 10 to 30 linked nucleosides complementary within nucleotides 2571-2586, 2867-3059, 3097-3116, 3341-3695, 4024-4039, 4446-4894, 5392-5817, 6128-6265, 6499-6890, 7231-7246, 8395-8410, 9153-9168, 9554-9569, 9931-9946, 10549-10564, 10660-10679, 11020-11035, 11793-12229, 12469-12920, 13351-13415, 13717-13732, 14149-14164, 14361-14555, 14965-15279, 15849-16001, 16253-16272, 16447-16545, 17130-17149, 17377-17669, 17927-17958, 18353-18368, 18636-18773, 19661-19918, 20288-20470, 20979-20994, 21215-21606, 21820-21837, 22150-22165, 22518-22536, 22803-22818, 26494-26522, 29049-29069, 29323-29489, 30550-30565, 30915-31191, 31468-31483, 32363-32382, 32827-33202, 33635-33795, 34138-34157, 34407-34422, 34845-34864, 35466-35485, 35669-35684, 36023-36042, 36266-36327, 36721-36827, 37032-37130, 37276-37295, 37504-37675, 38094-38118, 38841-38856, 39716-40538, 40706-40937, 41164-41183, 41342-41439, 42141-42164, 42700-42760, 43173-43537, 43765-46025, 46476-46532, 48423-48438, 50072-50210, 50470-50485, 50719-51234, 51747-51797, 52015-52143, 52230-52245, 52573-52652, 53466-54660, 54886-54901, 63751-64662, 64882-65099, 65363-65378, 65600-65615, 65988-66183, 66566-66581, 66978-67080, 67251-67270, 67662-67929, 68727-68742, 69203-69242, 69565-69620, 69889-70145, 70352-70584, 70925-71071, 71314-71329, 71617-71769, 72107-72241, 72584-72670, 73061-73076, 73350-73369, 73689-73723, 74107-74131, 74317-74557, 74947-75009, 75192-75207, 75979-76066, 76410-77095, 77292-77307, 77638-77869, 78122-78326, 79006-79021, 79478-79505, 80277-80292, 80575-80939, 81207-81222, 81524-81543, 81761-81776, 82233-82248, 82738-83198, 83330-83416, 83884-84063, 84381-85964, 86220-86392, 86554-86655, 86901-86920, 87181-87262, 88063-88082, 88293-88308, 88605-88967, 89160-89175, 89940-90255, 90473-90528, 91073-91088, 91273-91292, 91647-91662, 91930-92126, 92356-92371, 93190-93443, 93762-94111, 94374-94389, 94581-94653, 94839-94858, 95292-95583, 95829-95844, 96137-96503, 96793-97013, 97539-97554, 97800-97889, 98132-98151, 98624-98672, 98810-99115, 99258-99273, 99478-99503, 99791-99858, 100281-100300, 100406-100421, 100742-100828, 101080-101103, 101242-101320, 101788-101906, 102549-102568, 103566-103625, 104067-104086, 104277-104858, 105255-105274, 106147-106364, 106632-106647, 106964-107735, 108514-108788, 109336-109505, 109849-109864, 110403-110442, 110701-110974, 111203-111322, 112030-112049, 112499-112514, 112842-112861, 113028-113056, 113646-113665, 113896-113911, 114446-114465, 115087-115106, 119269-119284, 119659-119703, 120376-120497, 120738-120845, 121209-121228, 121823-122013, 122180-122199, 122588-122770, 123031-123050, 123152-123167, 123671-124055, 124413-124608, 125178-125197, 125533-125616, 126357-126434, 126736-126751, 126998-127236, 127454-127682, 128467-128482, 128813-129111, 129976-130013, 130308-130323, 131036-131056, 131286-131305, 131676-131691, 132171-132517, 133168-133241, 133522-133877, 134086-134101, 134240-134259, 134441-134617, 135015-135030, 135431-135519, 135818-135874, 136111-136130, 136282-136595, 136996-137152, 137372-137387, 137750-137765, 138048-138067, 138782-139840, 140343-140358, 140593-140701, 141116-141131, 141591-141719, 142113-142342, 143021-143048, 143185-143486, 143836-144109, 144558-144650, 144990-145078, 145428-145525, 145937-145952, 146235-146386, 147028-147043, 147259-147284, 147671-147686, 148059-148154, 148564-148579, 148904-149084, 149491-149506, 149787-149877, 150236-150251, 150588-151139, 151373-151659, 152201-152388, 152549-152771, 153001-153026, 153349-153364, 153831-154112, 154171-154186, 154502-154521, 154724-154828, 155283-155304, 155591-155616, 155889-155992, 156233-156612, 156847-156907, 157198-157223, 157330-157349, 157552-157567, 157927-158029, 158542-158631, 159216-159267, 159539-159793, 160352-160429, 160812-160827, 161248-161267, 161461-161607, 161821-161969, 162064-162083, 162132-162147, 162531-162770, 163019-163557, 164839-165059, 165419-165575, 165856-165875, 166241-166450, 166837-166852, 167107-167122, 168004-168019, 168760-168823, 169062-169092, 169134-169153, 169601-169711, 170081-170291, 170407-170426, 170703-170814, 171021-171036, 171207-171226, 171431-171568, 171926-171945, 172447-172462, 172733-172956, 173045-173756, 174122-174885, 175014-177830, 178895-180539, 181514-187644, 187857-189904, 190109-194159, 194425-195723, 196536-196873, 197326-197961, 198145-198170, 198307-198381, 198715-199007, 199506-199563, 199816-199838, 200249-200635, 201258-201861, 202079-202094, 202382-202717, 203098-203934, 204181-204740, 205549-205915, 206412-206764, 207510-207532, 209999-210014, 210189-210296, 210502-210583, 210920-211418, 211836-212223, 212606-212816, 213025-213044, 213425-213440, 213825-213933, 214479-214498, 214622-214647, 214884-214951, 215446-215508, 215932-215951, 216192-217595, 218132-218248, 218526-218541, 218734-21219037, 219342-219633, 219886-220705, 221044-221059, 221483-221607, 221947-221962, 222569-222584, 222914-222998, 223436-223451, 223948-224122, 224409-224430, 224717-224769, 225133-225148, 225436-225761, 226785-226898, 227025-227040, 227218-227251, 227485-227500, 227914-228837, 229174-229189, 229423-229438, 229615-229640, 230042-230057, 230313-230595, 231218-231345, 231817-232037, 232088-232408, 232823-232848, 232884-232899, 233210-233225, 233623-233646, 234447-234466, 234876-234918, 235258-235328, 235770-235785, 236071-236213, 236684-237196, 237585-237698, 237949-237557, 244873-244897, 245319-245334, 245701-245780, 246152-246523, 246936-247031, 247203-247240, 247431-247450, 247644-247659, 248223-248363, 248694-248762, 249494-249509, 250001-250020, 250693-250708, 251214-251233, 251601-251637, 251950-252060, 252665-252680, 252838-252863, 253140-253166, 253594-253819, 254036-254083, 254246-254345, 254641-254660, 254905-254920, 255397-255422, 255618-255633, 255992-256704, 257018-257092, 257317-257332, 257818-259305, 259500-259515, 261294-261656, 262021-262036, 262453-262779, 263338-266518, 266861-267131, 267375-268051, 268366-269447, 270038-271850, 271950-271969, 272631-274145, 274205-275747, 275808-276636, 276932-277064, 277391-278380, 278932-279063, 279303-281001, 281587-281610, 282229-283668, 290035-290474, 290924-292550, 292860-294408, 295475-297012, 297587-298115, 298161-298418, 298489-298738, 299082-299187, 299276-299669, 299723-299749, 299788-300504, or 300835-301295 of SEQ ID NO: 2, wherein said modified oligonucleotide is at least 90% complementary to SEQ ID NO: 2.

[0192] Certain embodiments provide a compound comprising a modified oligonucleotide and a conjugate group, wherein the modified oligonucleotide consists of 10 to 30 linked nucleosides having a nucleobase sequence comprising a portion of at least 8 contiguous nucleobases 100% complementary to an equal length portion of nucleobases 2571-2586, 2867-3059, 3097-3116, 3341-3695, 4024-4039, 4446-4894, 5392-5817, 6128-6265, 6499-6890, 7231-7246, 8395-8410, 9153-9168, 9554-9569, 9931-9946, 10549-10564, 10660-10679, 11020-11035, 11793-12229, 12469-12920, 13351-13415, 13717-13732, 14149-14164, 14361-14555, 14965-15279, 15849-16001, 16253-16272, 16447-16545, 17130-17149, 17377-17669, 17927-17958, 18353-18368, 18636-18773, 19661-19918, 20288-20470, 20979-20994, 21215-21606, 21820-21837, 22150-22165, 22518-22536, 22803-22818, 26494-26522, 29049-29069, 29323-29489, 30550-30565, 30915-31191, 31468-31483, 32363-32382, 32827-33202, 33635-33795, 34138-34157, 34407-34422, 34845-34864, 35466-35485, 35669-35684, 36023-36042, 36266-36327, 36721-36827, 37032-37130, 37276-37295, 37504-37675, 38094-38118, 38841-38856, 39716-40538, 40706-40937, 41164-41183, 41342-41439, 42141-42164, 42700-42760, 43173-43537, 43765-46025, 46476-46532, 48423-48438, 50072-50210, 50470-50485, 50719-51234, 51747-51797, 52015-52143, 52230-52245, 52573-52652, 53466-54660, 54886-54901, 63751-64662, 64882-65099, 65363-65378, 65600-65615, 65988-66183, 66566-66581, 66978-67080, 67251-67270, 67662-67929, 68727-68742, 69203-69242, 69565-69620, 69889-70145, 70352-70584, 70925-71071, 71314-71329, 71617-71769, 72107-72241, 72584-72670, 73061-73076, 73350-73369, 73689-73723, 74107-74131, 74317-74557, 74947-75009, 75192-75207, 75979-76066, 76410-77095, 77292-77307, 77638-77869, 78122-78326, 79006-79021, 79478-79505, 80277-80292, 80575-80939, 81207-81222, 81524-81543, 81761-81776, 82233-82248, 82738-83198, 83330-83416, 83884-84063, 84381-85964, 86220-86392, 86554-86655, 86901-86920, 87181-87262, 88063-88082, 88293-88308, 88605-88967, 89160-89175, 89940-90255, 90473-90528, 91073-91088, 91273-91292, 91647-91662, 91930-92126, 92356-92371, 93190-93443, 93762-94111, 94374-94389, 94581-94653, 94839-94858, 95292-95583, 95829-95844, 96137-96503, 96793-97013, 97539-97554, 97800-97889, 98132-98151, 98624-98672, 98810-99115, 99258-99273, 99478-99503, 99791-99858, 100281-100300, 100406-100421, 100742-100828, 101080-101103, 101242-101320, 101788-101906, 102549-102568, 103566-103625, 104067-104086, 104277-104858, 105255-105274, 106147-106364, 106632-106647, 106964-107735, 108514-108788, 109336-109505, 109849-109864, 110403-110442, 110701-110974, 111203-111322, 112030-112049, 112499-112514, 112842-112861, 113028-113056, 113646-113665, 113896-113911, 114446-114465, 115087-115106, 119269-119284, 119659-119703, 120376-120497, 120738-120845, 121209-121228, 121823-122013, 122180-122199, 122588-122770, 123031-123050, 123152-123167, 123671-124055, 124413-124608, 125178-125197, 125533-125616, 126357-126434, 126736-126751, 126998-127236, 127454-127682, 128467-128482, 128813-129111, 129976-130013, 130308-130323, 131036-131056, 131286-131305, 131676-131691, 132171-132517, 133168-133241, 133522-133877, 134086-134101, 134240-134259, 134441-134617, 135015-135030, 135431-135519, 135818-135874, 136111-136130, 136282-136595, 136996-137152, 137372-137387, 137750-137765, 138048-138067, 138782-139840, 140343-140358, 140593-140701, 141116-141131, 141591-141719, 142113-142342, 143021-143048, 143185-143486, 143836-144109, 144558-144650, 144990-145078, 145428-145525, 145937-145952, 146235-146386, 147028-147043, 147259-147284, 147671-147686, 148059-148154, 148564-148579, 148904-149084, 149491-149506, 149787-149877, 150236-150251, 150588-151139, 151373-151659, 152201-152388, 152549-152771, 153001-153026, 153349-153364, 153831-154112, 154171-154186, 154502-154521, 154724-154828, 155283-155304, 155591-155616, 155889-155992, 156233-156612, 156847-156907, 157198-157223, 157330-157349, 157552-157567, 157927-158029, 158542-158631, 159216-159267, 159539-159793, 160352-160429, 160812-160827, 161248-161267, 161461-161607, 161821-161969, 162064-162083, 162132-162147, 162531-162770, 163019-163557, 164839-165059, 165419-165575, 165856-165875, 166241-166450, 166837-166852, 167107-167122, 168004-168019, 168760-168823, 169062-169092, 169134-169153, 169601-169711, 170081-170291, 170407-170426, 170703-170814, 171021-171036, 171207-171226, 171431-171568, 171926-171945, 172447-172462, 172733-172956, 173045-173756, 174122-174885, 175014-177830, 178895-180539, 181514-187644, 187857-189904, 190109-194159, 194425-195723, 196536-196873, 197326-197961, 198145-198170, 198307-198381, 198715-199007, 199506-199563, 199816-199838, 200249-200635, 201258-201861, 202079-202094, 202382-202717, 203098-203934, 204181-204740, 205549-205915, 206412-206764, 207510-207532, 209999-210014, 210189-210296, 210502-210583, 210920-211418, 211836-212223, 212606-212816, 213025-213044, 213425-213440, 213825-213933, 214479-214498, 214622-214647, 214884-214951, 215446-215508, 215932-215951, 216192-217595, 218132-218248, 218526-218541, 218734-21219037, 219342-219633, 219886-220705, 221044-221059, 221483-221607, 221947-221962, 222569-222584, 222914-222998, 223436-223451, 223948-224122, 224409-224430, 224717-224769, 225133-225148, 225436-225761, 226785-226898, 227025-227040, 227218-227251, 227485-227500, 227914-228837, 229174-229189, 229423-229438, 229615-229640, 230042-230057, 230313-230595, 231218-231345, 231817-232037, 232088-232408, 232823-232848, 232884-232899, 233210-233225, 233623-233646, 234447-234466, 234876-234918, 235258-235328, 235770-235785, 236071-236213, 236684-237196, 237585-237698, 237949-237557, 244873-244897, 245319-245334, 245701-245780, 246152-246523, 246936-247031, 247203-247240, 247431-247450, 247644-247659, 248223-248363, 248694-248762, 249494-249509, 250001-250020, 250693-250708, 251214-251233, 251601-251637, 251950-252060, 252665-252680, 252838-252863, 253140-253166, 253594-253819, 254036-254083, 254246-254345, 254641-254660, 254905-254920, 255397-255422, 255618-255633, 255992-256704, 257018-257092, 257317-257332, 257818-259305, 259500-259515, 261294-261656, 262021-262036, 262453-262779, 263338-266518, 266861-267131, 267375-268051, 268366-269447, 270038-271850, 271950-271969, 272631-274145, 274205-275747, 275808-276636, 276932-277064, 277391-278380, 278932-279063, 279303-281001, 281587-281610, 282229-283668, 290035-290474, 290924-292550, 292860-294408, 295475-297012, 297587-298115, 298161-298418, 298489-298738, 299082-299187, 299276-299669, 299723-299749, 299788-300504, or 300835-301295 of SEQ ID NO: 2, wherein the nucleobase sequence of the modified oligonucleotide is complementary to SEQ ID NO: 2. In certain aspects, the compound comprises a modified oligonucleotide consisting of 10 to 30 linked nucleosides complementary within nucleotides 155594-155613, 72107-72126, 153921-153940, 159252-159267, 213425-213440, 153004-153019, 155597-155612, 248233-248248 of SEQ ID NO: 2.

[0193] Certain embodiments provide a compound comprising a modified oligonucleotide and a conjugate group, wherein the modified oligonucleotide consists of 10 to 30 linked nucleosides and having a nucleobase sequence comprising the nucleobase sequence of any one of SEQ ID NOs: 20-2295.

[0194] Certain embodiments provide a compound comprising a modified oligonucleotide and a conjugate group, wherein the modified oligonucleotide consists of the nucleobase sequence of any one of SEQ ID NOs: 20-2295.

[0195] In certain embodiments, a compound comprising an antisense compound or oligonucleotide and a conjugate group, wherein the antisense compound or oligonucleotide is targeted to a growth hormone receptor nucleic acid and is complementary within the following nucleotide regions of SEQ ID NO: 1: 30-51, 63-82, 103-118, 143-159, 164-197, 206-259, 361-388, 554-585, 625-700, 736-776, 862-887, 923-973, 978-996, 1127-1142, 1170-1195, 1317-1347, 1360-1383, 1418-1449, 1492-1507, 1524-1548, 1597-1634, 1641-1660, 1683-1698, 1744-1768, 1827-1860, 1949-2002, 2072-2092, 2095-2110, 2306-2321, 2665-2683, 2685-2719, 2739-2770, 2859-2880, 2941-2960, 2963-2978, 3037-3052, 3205-3252, 3306-3332, 3371-3386, 3518-3542, 3975-3990, 4041-4087, 4418-4446, 4528-4546, 7231-7246, 7570-7585, 8395-8410, 9153-9168, 9554-9569, 9931-9946, 10549-10564, 11020-11035, 11793-11808, 12214-12229, 12474-12489, 12905-12920, 13400-13415, 13717-13732, 14149-14164, 14540-14555, 15264-15279, 15849-15864, 16530-16545, 17377-17392, 17581-17596, 17943-17958, 18353-18368, 18636-18651, 19256-19271, 19814-19829, 20365-20380, 20979-20994, 21566-21581, 22150-22165, 22803-22818, 29049-29064, 29554-29569, 30245-30260, 30550-30565, 30915-30930, 31468-31483, 32366-32381, 32897-32912, 33187-33202, 33780-33795, 34407-34422, 34846-34861, 35669-35684, 36312-36327, 36812-36827, 37504-37519, 38841-38856, 40250-40265, 40706-40721, 40922-40937, 41424-41439, 41999-42014, 42481-42496, 42700-42715, 43291-43306, 43500-43515, 43947-43962, 44448-44463, 45162-45177, 46010-46025, 46476-46491, 47447-47462, 47752-47767, 48001-48016, 48423-48438, 50195-50210, 50470-50485, 51104-51119, 51756-51771, 52015-52030, 52230-52245, 52588-52603, 53532-53547, or 54645-54660.

[0196] In certain embodiments, a compound comprising an antisense compound or oligonucleotide and a conjugate group, wherein the antisense compound or oligonucleotide is targeted to a growth hormone receptor nucleic acid and targets the following nucleotide regions of SEQ ID NO: 1: 30-51, 63-82, 103-118, 143-159, 164-197, 206-259, 361-388, 554-585, 625-700, 736-776, 862-887, 923-973, 978-996, 1127-1142, 1170-1195, 1317-1347, 1360-1383, 1418-1449, 1492-1507, 1524-1548, 1597-1634, 1641-1660, 1683-1698, 1744-1768, 1827-1860, 1949-2002, 2072-2092, 2095-2110, 2306-2321, 2665-2683, 2685-2719, 2739-2770, 2859-2880, 2941-2960, 2963-2978, 3037-3052, 3205-3252, 3306-3332, 3371-3386, 3518-3542, 3975-3990, 4041-4087, 4418-4446, 4528-4546, 7231-7246, 7570-7585, 8395-8410, 9153-9168, 9554-9569, 9931-9946, 10549-10564, 11020-11035, 11793-11808, 12214-12229, 12474-12489, 12905-12920, 13400-13415, 13717-13732, 14149-14164, 14540-14555, 15264-15279, 15849-15864, 16530-16545, 17377-17392, 17581-17596, 17943-17958, 18353-18368, 18636-18651, 19256-19271, 19814-19829, 20365-20380, 20979-20994, 21566-21581, 22150-22165, 22803-22818, 29049-29064, 29554-29569, 30245-30260, 30550-30565, 30915-30930, 31468-31483, 32366-32381, 32897-32912, 33187-33202, 33780-33795, 34407-34422, 34846-34861, 35669-35684, 36312-36327, 36812-36827, 37504-37519, 38841-38856, 40250-40265, 40706-40721, 40922-40937, 41424-41439, 41999-42014, 42481-42496, 42700-42715, 43291-43306, 43500-43515, 43947-43962, 44448-44463, 45162-45177, 46010-46025, 46476-46491, 47447-47462, 47752-47767, 48001-48016, 48423-48438, 50195-50210, 50470-50485, 51104-51119, 51756-51771, 52015-52030, 52230-52245, 52588-52603, 53532-53547, or 54645-54660.

[0197] In certain embodiments, a compound comprises an antisense compound or oligonucleotide and a conjugate group, wherein the antisense compound or oligonucleotide is targeted to a region of a growth hormone receptor nucleic acid. In certain embodiments, such compounds or oligonucleotides targeted to a region of a GHR nucleic acid have a contiguous nucleobase portion that is complementary to an equal length nucleobase portion of the region. For example, the portion can be at least an 8, 9, 10, 11, 12, 13, 14, 15, or 16 contiguous nucleobases portion complementary to an equal length portion of a region recited herein. In certain embodiments, such compounds or oligonucleotide target the following nucleotide regions of SEQ ID NO: 1:30-51, 63-82, 103-118, 143-159, 164-197, 206-259, 361-388, 554-585, 625-700, 736-776, 862-887, 923-973, 978-996, 1127-1142, 1170-1195, 1317-1347, 1360-1383, 1418-1449, 1492-1507, 1524-1548, 1597-1634, 1641-1660, 1683-1698, 1744-1768, 1827-1860, 1949-2002, 2072-2092, 2095-2110, 2306-2321, 2665-2683, 2685-2719, 2739-2770, 2859-2880, 2941-2960, 2963-2978, 3037-3052, 3205-3252, 3306-3332, 3371-3386, 3518-3542, 3975-3990, 4041-4087, 4418-4446, 4528-4546, 7231-7246, 7570-7585, 8395-8410, 9153-9168, 9554-9569, 9931-9946, 10549-10564, 11020-11035, 11793-11808, 12214-12229, 12474-12489, 12905-12920, 13400-13415, 13717-13732, 14149-14164, 14540-14555, 15264-15279, 15849-15864, 16530-16545, 17377-17392, 17581-17596, 17943-17958, 18353-18368, 18636-18651, 19256-19271, 19814-19829, 20365-20380, 20979-20994, 21566-21581, 22150-22165, 22803-22818, 29049-29064, 29554-29569, 30245-30260, 30550-30565, 30915-30930, 31468-31483, 32366-32381, 32897-32912, 33187-33202, 33780-33795, 34407-34422, 34846-34861, 35669-35684, 36312-36327, 36812-36827, 37504-37519, 38841-38856, 40250-40265, 40706-40721, 40922-40937, 41424-41439, 41999-42014, 42481-42496, 42700-42715, 43291-43306, 43500-43515, 43947-43962, 44448-44463, 45162-45177, 46010-46025, 46476-46491, 47447-47462, 47752-47767, 48001-48016, 48423-48438, 50195-50210, 50470-50485, 51104-51119, 51756-51771, 52015-52030, 52230-52245, 52588-52603, 53532-53547, or 54645-54660.

[0198] In certain embodiments, a compound comprising an antisense compound or oligonucleotide and a conjugate group, wherein the antisense compound or oligonucleotide is targeted to a growth hormone receptor nucleic acid is complementary within the following nucleotide regions of SEQ ID NO: 2: 2571-2586, 2867-3059, 3097-3116, 3341-3695, 4024-4039, 4446-4894, 5392-5817, 6128-6265, 6499-6890, 7231-7246, 8395-8410, 9153-9168, 9554-9569, 9931-9946, 10549-10564, 10660-10679, 11020-11035, 11793-12229, 12469-12920, 13351-13415, 13717-13732, 14149-14164, 14361-14555, 14965-15279, 15849-16001, 16253-16272, 16447-16545, 17130-17149, 17377-17669, 17927-17958, 18353-18368, 18636-18773, 19661-19918, 20288-20470, 20979-20994, 21215-21606, 21820-21837, 22150-22165, 22518-22536, 22803-22818, 26494-26522, 29049-29069, 29323-29489, 30550-30565, 30915-31191, 31468-31483, 32363-32382, 32827-33202, 33635-33795, 34138-34157, 34407-34422, 34845-34864, 35466-35485, 35669-35684, 36023-36042, 36266-36327, 36721-36827, 37032-37130, 37276-37295, 37504-37675, 38094-38118, 38841-38856, 39716-40538, 40706-40937, 41164-41183, 41342-41439, 42141-42164, 42700-42760, 43173-43537, 43765-46025, 46476-46532, 48423-48438, 50072-50210, 50470-50485, 50719-51234, 51747-51797, 52015-52143, 52230-52245, 52573-52652, 53466-54660, 54886-54901, 63751-64662, 64882-65099, 65363-65378, 65600-65615, 65988-66183, 66566-66581, 66978-67080, 67251-67270, 67662-67929, 68727-68742, 69203-69242, 69565-69620, 69889-70145, 70352-70584, 70925-71071, 71314-71329, 71617-71769, 72107-72241, 72584-72670, 73061-73076, 73350-73369, 73689-73723, 74107-74131, 74317-74557, 74947-75009, 75192-75207, 75979-76066, 76410-77095, 77292-77307, 77638-77869, 78122-78326, 79006-79021, 79478-79505, 80277-80292, 80575-80939, 81207-81222, 81524-81543, 81761-81776, 82233-82248, 82738-83198, 83330-83416, 83884-84063, 84381-85964, 86220-86392, 86554-86655, 86901-86920, 87181-87262, 88063-88082, 88293-88308, 88605-88967, 89160-89175, 89940-90255, 90473-90528, 91073-91088, 91273-91292, 91647-91662, 91930-92126, 92356-92371, 93190-93443, 93762-94111, 94374-94389, 94581-94653, 94839-94858, 95292-95583, 95829-95844, 96137-96503, 96793-97013, 97539-97554, 97800-97889, 98132-98151, 98624-98672, 98810-99115, 99258-99273, 99478-99503, 99791-99858, 100281-100300, 100406-100421, 100742-100828, 101080-101103, 101242-101320, 101788-101906, 102549-102568, 103566-103625, 104067-104086, 104277-104858, 105255-105274, 106147-106364, 106632-106647, 106964-107735, 108514-108788, 109336-109505, 109849-109864, 110403-110442, 110701-110974, 111203-111322, 112030-112049, 112499-112514, 112842-112861, 113028-113056, 113646-113665, 113896-113911, 114446-114465, 115087-115106, 119269-119284, 119659-119703, 120376-120497, 120738-120845, 121209-121228, 121823-122013, 122180-122199, 122588-122770, 123031-123050, 123152-123167, 123671-124055, 124413-124608, 125178-125197, 125533-125616, 126357-126434, 126736-126751, 126998-127236, 127454-127682, 128467-128482, 128813-129111, 129976-130013, 130308-130323, 131036-131056, 131286-131305, 131676-131691, 132171-132517, 133168-133241, 133522-133877, 134086-134101, 134240-134259, 134441-134617, 135015-135030, 135431-135519, 135818-135874, 136111-136130, 136282-136595, 136996-137152, 137372-137387, 137750-137765, 138048-138067, 138782-139840, 140343-140358, 140593-140701, 141116-141131, 141591-141719, 142113-142342, 143021-143048, 143185-143486, 143836-144109, 144558-144650, 144990-145078, 145428-145525, 145937-145952, 146235-146386, 147028-147043, 147259-147284, 147671-147686, 148059-148154, 148564-148579, 148904-149084, 149491-149506, 149787-149877, 150236-150251, 150588-151139, 151373-151659, 152201-152388, 152549-152771, 153001-153026, 153349-153364, 153831-154112, 154171-154186, 154502-154521, 154724-154828, 155283-155304, 155591-155616, 155889-155992, 156233-156612, 156847-156907, 157198-157223, 157330-157349, 157552-157567, 157927-158029, 158542-158631, 159216-159267, 159539-159793, 160352-160429, 160812-160827, 161248-161267, 161461-161607, 161821-161969, 162064-162083, 162132-162147, 162531-162770, 163019-163557, 164839-165059, 165419-165575, 165856-165875, 166241-166450, 166837-166852, 167107-167122, 168004-168019, 168760-168823, 169062-169092, 169134-169153, 169601-169711, 170081-170291, 170407-170426, 170703-170814, 171021-171036, 171207-171226, 171431-171568, 171926-171945, 172447-172462, 172733-172956, 173045-173756, 174122-174885, 175014-177830, 178895-180539, 181514-187644, 187857-189904, 190109-194159, 194425-195723, 196536-196873, 197326-197961, 198145-198170, 198307-198381, 198715-199007, 199506-199563, 199816-199838, 200249-200635, 201258-201861, 202079-202094, 202382-202717, 203098-203934, 204181-204740, 205549-205915, 206412-206764, 207510-207532, 209999-210014, 210189-210296, 210502-210583, 210920-211418, 211836-212223, 212606-212816, 213025-213044, 213425-213440, 213825-213933, 214479-214498, 214622-214647, 214884-214951, 215446-215508, 215932-215951, 216192-217595, 218132-218248, 218526-218541, 218734-21219037, 219342-219633, 219886-220705, 221044-221059, 221483-221607, 221947-221962, 222569-222584, 222914-222998, 223436-223451, 223948-224122, 224409-224430, 224717-224769, 225133-225148, 225436-225761, 226785-226898, 227025-227040, 227218-227251, 227485-227500, 227914-228837, 229174-229189, 229423-229438, 229615-229640, 230042-230057, 230313-230595, 231218-231345, 231817-232037, 232088-232408, 232823-232848, 232884-232899, 233210-233225, 233623-233646, 234447-234466, 234876-234918, 235258-235328, 235770-235785, 236071-236213, 236684-237196, 237585-237698, 237949-237557, 244873-244897, 245319-245334, 245701-245780, 246152-246523, 246936-247031, 247203-247240, 247431-247450, 247644-247659, 248223-248363, 248694-248762, 249494-249509, 250001-250020, 250693-250708, 251214-251233, 251601-251637, 251950-252060, 252665-252680, 252838-252863, 253140-253166, 253594-253819, 254036-254083, 254246-254345, 254641-254660, 254905-254920, 255397-255422, 255618-255633, 255992-256704, 257018-257092, 257317-257332, 257818-259305, 259500-259515, 261294-261656, 262021-262036, 262453-262779, 263338-266518, 266861-267131, 267375-268051, 268366-269447, 270038-271850, 271950-271969, 272631-274145, 274205-275747, 275808-276636, 276932-277064, 277391-278380, 278932-279063, 279303-281001, 281587-281610, 282229-283668, 290035-290474, 290924-292550, 292860-294408, 295475-297012, 297587-298115, 298161-298418, 298489-298738, 299082-299187, 299276-299669, 299723-299749, 299788-300504, or 300835-301295.

[0199] In certain embodiments, a compound comprising an antisense compound or oligonucleotide and a conjugate group, wherein the antisense compound or oligonucleotide is targeted to a growth hormone receptor nucleic acid targets the following nucleotide regions of SEQ ID NO: 2: 2571-2586, 2867-3059, 3097-3116, 3341-3695, 4024-4039, 4446-4894, 5392-5817, 6128-6265, 6499-6890, 7231-7246, 8395-8410, 9153-9168, 9554-9569, 9931-9946, 10549-10564, 10660-10679, 11020-11035, 11793-12229, 12469-12920, 13351-13415, 13717-13732, 14149-14164, 14361-14555, 14965-15279, 15849-16001, 16253-16272, 16447-16545, 17130-17149, 17377-17669, 17927-17958, 18353-18368, 18636-18773, 19661-19918, 20288-20470, 20979-20994, 21215-21606, 21820-21837, 22150-22165, 22518-22536, 22803-22818, 26494-26522, 29049-29069, 29323-29489, 30550-30565, 30915-31191, 31468-31483, 32363-32382, 32827-33202, 33635-33795, 34138-34157, 34407-34422, 34845-34864, 35466-35485, 35669-35684, 36023-36042, 36266-36327, 36721-36827, 37032-37130, 37276-37295, 37504-37675, 38094-38118, 38841-38856, 39716-40538, 40706-40937, 41164-41183, 41342-41439, 42141-42164, 42700-42760, 43173-43537, 43765-46025, 46476-46532, 48423-48438, 50072-50210, 50470-50485, 50719-51234, 51747-51797, 52015-52143, 52230-52245, 52573-52652, 53466-54660, 54886-54901, 63751-64662, 64882-65099, 65363-65378, 65600-65615, 65988-66183, 66566-66581, 66978-67080, 67251-67270, 67662-67929, 68727-68742, 69203-69242, 69565-69620, 69889-70145, 70352-70584, 70925-71071, 71314-71329, 71617-71769, 72107-72241, 72584-72670, 73061-73076, 73350-73369, 73689-73723, 74107-74131, 74317-74557, 74947-75009, 75192-75207, 75979-76066, 76410-77095, 77292-77307, 77638-77869, 78122-78326, 79006-79021, 79478-79505, 80277-80292, 80575-80939, 81207-81222, 81524-81543, 81761-81776, 82233-82248, 82738-83198, 83330-83416, 83884-84063, 84381-85964, 86220-86392, 86554-86655, 86901-86920, 87181-87262, 88063-88082, 88293-88308, 88605-88967, 89160-89175, 89940-90255, 90473-90528, 91073-91088, 91273-91292, 91647-91662, 91930-92126, 92356-92371, 93190-93443, 93762-94111, 94374-94389, 94581-94653, 94839-94858, 95292-95583, 95829-95844, 96137-96503, 96793-97013, 97539-97554, 97800-97889, 98132-98151, 98624-98672, 98810-99115, 99258-99273, 99478-99503, 99791-99858, 100281-100300, 100406-100421, 100742-100828, 101080-101103, 101242-101320, 101788-101906, 102549-102568, 103566-103625, 104067-104086, 104277-104858, 105255-105274, 106147-106364, 106632-106647, 106964-107735, 108514-108788, 109336-109505, 109849-109864, 110403-110442, 110701-110974, 111203-111322, 112030-112049, 112499-112514, 112842-112861, 113028-113056, 113646-113665, 113896-113911, 114446-114465, 115087-115106, 119269-119284, 119659-119703, 120376-120497, 120738-120845, 121209-121228, 121823-122013, 122180-122199, 122588-122770, 123031-123050, 123152-123167, 123671-124055, 124413-124608, 125178-125197, 125533-125616, 126357-126434, 126736-126751, 126998-127236, 127454-127682, 128467-128482, 128813-129111, 129976-130013, 130308-130323, 131036-131056, 131286-131305, 131676-131691, 132171-132517, 133168-133241, 133522-133877, 134086-134101, 134240-134259, 134441-134617, 135015-135030, 135431-135519, 135818-135874, 136111-136130, 136282-136595, 136996-137152, 137372-137387, 137750-137765, 138048-138067, 138782-139840, 140343-140358, 140593-140701, 141116-141131, 141591-141719, 142113-142342, 143021-143048, 143185-143486, 143836-144109, 144558-144650, 144990-145078, 145428-145525, 145937-145952, 146235-146386, 147028-147043, 147259-147284, 147671-147686, 148059-148154, 148564-148579, 148904-149084, 149491-149506, 149787-149877, 150236-150251, 150588-151139, 151373-151659, 152201-152388, 152549-152771, 153001-153026, 153349-153364, 153831-154112, 154171-154186, 154502-154521, 154724-154828, 155283-155304, 155591-155616, 155889-155992, 156233-156612, 156847-156907, 157198-157223, 157330-157349, 157552-157567, 157927-158029, 158542-158631, 159216-159267, 159539-159793, 160352-160429, 160812-160827, 161248-161267, 161461-161607, 161821-161969, 162064-162083, 162132-162147, 162531-162770, 163019-163557, 164839-165059, 165419-165575, 165856-165875, 166241-166450, 166837-166852, 167107-167122, 168004-168019, 168760-168823, 169062-169092, 169134-169153, 169601-169711, 170081-170291, 170407-170426, 170703-170814, 171021-171036, 171207-171226, 171431-171568, 171926-171945, 172447-172462, 172733-172956, 173045-173756, 174122-174885, 175014-177830, 178895-180539, 181514-187644, 187857-189904, 190109-194159, 194425-195723, 196536-196873, 197326-197961, 198145-198170, 198307-198381, 198715-199007, 199506-199563, 199816-199838, 200249-200635, 201258-201861, 202079-202094, 202382-202717, 203098-203934, 204181-204740, 205549-205915, 206412-206764, 207510-207532, 209999-210014, 210189-210296, 210502-210583, 210920-211418, 211836-212223, 212606-212816, 213025-213044, 213425-213440, 213825-213933, 214479-214498, 214622-214647, 214884-214951, 215446-215508, 215932-215951, 216192-217595, 218132-218248, 218526-218541, 218734-21219037, 219342-219633, 219886-220705, 221044-221059, 221483-221607, 221947-221962, 222569-222584, 222914-222998, 223436-223451, 223948-224122, 224409-224430, 224717-224769, 225133-225148, 225436-225761, 226785-226898, 227025-227040, 227218-227251, 227485-227500, 227914-228837, 229174-229189, 229423-229438, 229615-229640, 230042-230057, 230313-230595, 231218-231345, 231817-232037, 232088-232408, 232823-232848, 232884-232899, 233210-233225, 233623-233646, 234447-234466, 234876-234918, 235258-235328, 235770-235785, 236071-236213, 236684-237196, 237585-237698, 237949-237557, 244873-244897, 245319-245334, 245701-245780, 246152-246523, 246936-247031, 247203-247240, 247431-247450, 247644-247659, 248223-248363, 248694-248762, 249494-249509, 250001-250020, 250693-250708, 251214-251233, 251601-251637, 251950-252060, 252665-252680, 252838-252863, 253140-253166, 253594-253819, 254036-254083, 254246-254345, 254641-254660, 254905-254920, 255397-255422, 255618-255633, 255992-256704, 257018-257092, 257317-257332, 257818-259305, 259500-259515, 261294-261656, 262021-262036, 262453-262779, 263338-266518, 266861-267131, 267375-268051, 268366-269447, 270038-271850, 271950-271969, 272631-274145, 274205-275747, 275808-276636, 276932-277064, 277391-278380, 278932-279063, 279303-281001, 281587-281610, 282229-283668, 290035-290474, 290924-292550, 292860-294408, 295475-297012, 297587-298115, 298161-298418, 298489-298738, 299082-299187, 299276-299669, 299723-299749, 299788-300504, or 300835-301295.

[0200] In certain embodiments, a compound comprises an antisense compound or oligonucleotide and a conjugate group, wherein the antisense compound or oligonucleotide is targeted to a region of a growth hormone receptor nucleic acid. In certain embodiments, such compounds or oligonucleotides targeted to a region of a GHR nucleic acid have a contiguous nucleobase portion that is complementary to an equal length nucleobase portion of the region. For example, the portion can be at least an 8, 9, 10, 11, 12, 13, 14, 15, or 16 contiguous nucleobases portion complementary to an equal length portion of a region recited herein. In certain embodiments, such compounds or oligonucleotide target the following nucleotide regions of SEQ ID NO: 2: 2571-2586, 2867-3059, 3097-3116, 3341-3695, 4024-4039, 4446-4894, 5392-5817, 6128-6265, 6499-6890, 7231-7246, 8395-8410, 9153-9168, 9554-9569, 9931-9946, 10549-10564, 10660-10679, 11020-11035, 11793-12229, 12469-12920, 13351-13415, 13717-13732, 14149-14164, 14361-14555, 14965-15279, 15849-16001, 16253-16272, 16447-16545, 17130-17149, 17377-17669, 17927-17958, 18353-18368, 18636-18773, 19661-19918, 20288-20470, 20979-20994, 21215-21606, 21820-21837, 22150-22165, 22518-22536, 22803-22818, 26494-26522, 29049-29069, 29323-29489, 30550-30565, 30915-31191, 31468-31483, 32363-32382, 32827-33202, 33635-33795, 34138-34157, 34407-34422, 34845-34864, 35466-35485, 35669-35684, 36023-36042, 36266-36327, 36721-36827, 37032-37130, 37276-37295, 37504-37675, 38094-38118, 38841-38856, 39716-40538, 40706-40937, 41164-41183, 41342-41439, 42141-42164, 42700-42760, 43173-43537, 43765-46025, 46476-46532, 48423-48438, 50072-50210, 50470-50485, 50719-51234, 51747-51797, 52015-52143, 52230-52245, 52573-52652, 53466-54660, 54886-54901, 63751-64662, 64882-65099, 65363-65378, 65600-65615, 65988-66183, 66566-66581, 66978-67080, 67251-67270, 67662-67929, 68727-68742, 69203-69242, 69565-69620, 69889-70145, 70352-70584, 70925-71071, 71314-71329, 71617-71769, 72107-72241, 72584-72670, 73061-73076, 73350-73369, 73689-73723, 74107-74131, 74317-74557, 74947-75009, 75192-75207, 75979-76066, 76410-77095, 77292-77307, 77638-77869, 78122-78326, 79006-79021, 79478-79505, 80277-80292, 80575-80939, 81207-81222, 81524-81543, 81761-81776, 82233-82248, 82738-83198, 83330-83416, 83884-84063, 84381-85964, 86220-86392, 86554-86655, 86901-86920, 87181-87262, 88063-88082, 88293-88308, 88605-88967, 89160-89175, 89940-90255, 90473-90528, 91073-91088, 91273-91292, 91647-91662, 91930-92126, 92356-92371, 93190-93443, 93762-94111, 94374-94389, 94581-94653, 94839-94858, 95292-95583, 95829-95844, 96137-96503, 96793-97013, 97539-97554, 97800-97889, 98132-98151, 98624-98672, 98810-99115, 99258-99273, 99478-99503, 99791-99858, 100281-100300, 100406-100421, 100742-100828, 101080-101103, 101242-101320, 101788-101906, 102549-102568, 103566-103625, 104067-104086, 104277-104858, 105255-105274, 106147-106364, 106632-106647, 106964-107735, 108514-108788, 109336-109505, 109849-109864, 110403-110442, 110701-110974, 111203-111322, 112030-112049, 112499-112514, 112842-112861, 113028-113056, 113646-113665, 113896-113911, 114446-114465, 115087-115106, 119269-119284, 119659-119703, 120376-120497, 120738-120845, 121209-121228, 121823-122013, 122180-122199, 122588-122770, 123031-123050, 123152-123167, 123671-124055, 124413-124608, 125178-125197, 125533-125616, 126357-126434, 126736-126751, 126998-127236, 127454-127682, 128467-128482, 128813-129111, 129976-130013, 130308-130323, 131036-131056, 131286-131305, 131676-131691, 132171-132517, 133168-133241, 133522-133877, 134086-134101, 134240-134259, 134441-134617, 135015-135030, 135431-135519, 135818-135874, 136111-136130, 136282-136595, 136996-137152, 137372-137387, 137750-137765, 138048-138067, 138782-139840, 140343-140358, 140593-140701, 141116-141131, 141591-141719, 142113-142342, 143021-143048, 143185-143486, 143836-144109, 144558-144650, 144990-145078, 145428-145525, 145937-145952, 146235-146386, 147028-147043, 147259-147284, 147671-147686, 148059-148154, 148564-148579, 148904-149084, 149491-149506, 149787-149877, 150236-150251, 150588-151139, 151373-151659, 152201-152388, 152549-152771, 153001-153026, 153349-153364, 153831-154112, 154171-154186, 154502-154521, 154724-154828, 155283-155304, 155591-155616, 155889-155992, 156233-156612, 156847-156907, 157198-157223, 157330-157349, 157552-157567, 157927-158029, 158542-158631, 159216-159267, 159539-159793, 160352-160429, 160812-160827, 161248-161267, 161461-161607, 161821-161969, 162064-162083, 162132-162147, 162531-162770, 163019-163557, 164839-165059, 165419-165575, 165856-165875, 166241-166450, 166837-166852, 167107-167122, 168004-168019, 168760-168823, 169062-169092, 169134-169153, 169601-169711, 170081-170291, 170407-170426, 170703-170814, 171021-171036, 171207-171226, 171431-171568, 171926-171945, 172447-172462, 172733-172956, 173045-173756, 174122-174885, 175014-177830, 178895-180539, 181514-187644, 187857-189904, 190109-194159, 194425-195723, 196536-196873, 197326-197961, 198145-198170, 198307-198381, 198715-199007, 199506-199563, 199816-199838, 200249-200635, 201258-201861, 202079-202094, 202382-202717, 203098-203934, 204181-204740, 205549-205915, 206412-206764, 207510-207532, 209999-210014, 210189-210296, 210502-210583, 210920-211418, 211836-212223, 212606-212816, 213025-213044, 213425-213440, 213825-213933, 214479-214498, 214622-214647, 214884-214951, 215446-215508, 215932-215951, 216192-217595, 218132-218248, 218526-218541, 218734-21219037, 219342-219633, 219886-220705, 221044-221059, 221483-221607, 221947-221962, 222569-222584, 222914-222998, 223436-223451, 223948-224122, 224409-224430, 224717-224769, 225133-225148, 225436-225761, 226785-226898, 227025-227040, 227218-227251, 227485-227500, 227914-228837, 229174-229189, 229423-229438, 229615-229640, 230042-230057, 230313-230595, 231218-231345, 231817-232037, 232088-232408, 232823-232848, 232884-232899, 233210-233225, 233623-233646, 234447-234466, 234876-234918, 235258-235328, 235770-235785, 236071-236213, 236684-237196, 237585-237698, 237949-237557, 244873-244897, 245319-245334, 245701-245780, 246152-246523, 246936-247031, 247203-247240, 247431-247450, 247644-247659, 248223-248363, 248694-248762, 249494-249509, 250001-250020, 250693-250708, 251214-251233, 251601-251637, 251950-252060, 252665-252680, 252838-252863, 253140-253166, 253594-253819, 254036-254083, 254246-254345, 254641-254660, 254905-254920, 255397-255422, 255618-255633, 255992-256704, 257018-257092, 257317-257332, 257818-259305, 259500-259515, 261294-261656, 262021-262036, 262453-262779, 263338-266518, 266861-267131, 267375-268051, 268366-269447, 270038-271850, 271950-271969, 272631-274145, 274205-275747, 275808-276636, 276932-277064, 277391-278380, 278932-279063, 279303-281001, 281587-281610, 282229-283668, 290035-290474, 290924-292550, 292860-294408, 295475-297012, 297587-298115, 298161-298418, 298489-298738, 299082-299187, 299276-299669, 299723-299749, 299788-300504, or 300835-301295.

[0201] In certain embodiments, a compound comprises an antisense compound or oligonucleotide and a conjugate group, wherein the antisense compound or oligonucleotide is targeted to target intron 1 of a growth hormone receptor nucleic acid. In certain aspects, antisense compounds or oligonucleotides target within nucleotides 3058-144965 (intron 1) of a growth hormone receptor nucleic acid having the nucleobase sequence of SEQ ID NO: 2 (GENBANK Accession No. NT_006576.16 truncated from nucleotides 42411001 to 42714000).

[0202] In certain embodiments, a compound comprises an antisense compound or oligonucleotide and a conjugate group, wherein the antisense compound or oligonucleotide is targeted to intron 2 of a growth hormone receptor nucleic acid. In certain aspects, antisense compounds or oligonucleotides target within nucleotides 145047-208139 (intron 2) of a growth hormone receptor nucleic acid having the nucleobase sequence of SEQ ID NO: 2 (GENBANK Accession No. NT_006576.16 truncated from nucleotides 42411001 to 42714000).

[0203] In certain embodiments, a compound comprises an antisense compound or oligonucleotide and a conjugate group, wherein the antisense compound or oligonucleotide is targeted to intron 3 of a growth hormone receptor nucleic acid. In certain aspects, antisense compounds or oligonucleotides target within nucleotides 208206-267991 (intron 3) of a growth hormone receptor nucleic acid having the nucleobase sequence of SEQ ID NO: 2 (GENBANK Accession No. NT_006576.16 truncated from nucleotides 42411001 to 42714000).

[0204] In certain embodiments, a compound comprises an antisense compound or oligonucleotide and a conjugate group, wherein the antisense compound or oligonucleotide is targeted to intron 4 of a growth hormone receptor nucleic acid. In certain aspects, antisense compounds or oligonucleotides target within nucleotides 268122-274018 (intron 4) of a growth hormone receptor nucleic acid having the nucleobase sequence of SEQ ID NO: 2 (GENBANK Accession No. NT_006576.16 truncated from nucleotides 42411001 to 42714000).

[0205] In certain embodiments, a compound comprises an antisense compound or oligonucleotide and a conjugate group, wherein the antisense compound or oligonucleotide is targeted to intron 5 of a growth hormone receptor nucleic acid. In certain aspects, antisense compounds or oligonucleotides target within nucleotides 274192-278925 (intron 5) of a growth hormone receptor nucleic acid having the nucleobase sequence of SEQ ID NO: 2 (GENBANK Accession No. NT_006576.16 truncated from nucleotides 42411001 to 42714000).

[0206] In certain embodiments, a compound comprises an antisense compound or oligonucleotide and a conjugate group, wherein the antisense compound or oligonucleotide is targeted to intron 6 of a growth hormone receptor nucleic acid. In certain aspects, antisense compounds or oligonucleotides target within nucleotides 279105-290308 (intron 6) of a growth hormone receptor nucleic acid having the nucleobase sequence of SEQ ID NO: 2 (GENBANK Accession No. NT_006576.16 truncated from nucleotides 42411001 to 42714000).

[0207] In certain embodiments, a compound comprises an antisense compound or oligonucleotide and a conjugate group, wherein the antisense compound or oligonucleotide is targeted to intron 7 of a growth hormone receptor nucleic acid. In certain aspects, antisense compounds or oligonucleotides target within nucleotides 290475-292530 (intron 7) of a growth hormone receptor nucleic acid having the nucleobase sequence of SEQ ID NO: 2 (GENBANK Accession No. NT_006576.16 truncated from nucleotides 42411001 to 42714000).

[0208] In certain embodiments, a compound comprises an antisense compound or oligonucleotide and a conjugate group, wherein the antisense compound or oligonucleotide is targeted to intron 8 of a growth hormone receptor nucleic acid. In certain aspects, antisense compounds or oligonucleotides target within nucleotides 292622-297153 (intron 8) of a growth hormone receptor nucleic acid having the nucleobase sequence of SEQ ID NO: 2 (GENBANK Accession No. NT_006576.16 truncated from nucleotides 42411001 to 42714000).

[0209] In certain embodiments, a compound comprises an antisense compound or oligonucleotide and a conjugate group, wherein the antisense compound or oligonucleotide is targeted to intron 9 of a growth hormone receptor nucleic acid. In certain aspects, antisense compounds or oligonucleotides target within nucleotides 297224-297554 (intron 9) of a growth hormone receptor nucleic acid having the nucleobase sequence of SEQ ID NO: 2 (GENBANK Accession No. NT_006576.16 truncated from nucleotides 42411001 to 42714000).

[0210] In certain embodiments, any of the foregoing compounds or oligonucleotides comprises at least one modified internucleoside linkage, at least one modified sugar, and/or at least one modified nucleobase.

[0211] In certain embodiments, any of the foregoing compounds or oligonucleotides comprises at least one modified sugar. In certain aspects, at least one modified sugar comprises a 2′-O-methoxyethyl group. In certain aspects, at least one modified sugar is a bicyclic sugar, such as a 4′-CH(CH3)-O-2′ group, a 4′-CH2-O-2′ group, or a 4′-(CH2)2-O-2′group.

[0212] In certain aspects, the modified oligonucleotide comprises at least one modified internucleoside linkage, such as a phosphorothioate internucleoside linkage.

[0213] In certain embodiments, any of the foregoing compounds or oligonucleotides comprises at least one modified nucleobase, such as 5-methylcytosine.

[0214] In certain embodiments, any of the foregoing compounds or oligonucleotides comprises:
[0215] a gap segment consisting of linked deoxynucleosides;
[0216] a 5′ wing segment consisting of linked nucleosides; and
[0217] a 3′ wing segment consisting of linked nucleosides;
   wherein the gap segment is positioned between the 5′ wing segment and the 3′ wing segment and wherein each nucleoside of each wing segment comprises a modified sugar.

[0218] Certain embodiments provide a compound comprising a modified oligonucleotide consisting of 10 to 30 linked nucleosides having a nucleobase sequence comprising the sequence recited in SEQ ID NO: 918, 479, 703, 1800, 1904, 2122, 2127, or 2194.

[0219] In certain aspects, the modified oligonucleotide has a nucleobase sequence comprising the sequence recited in SEQ ID NOs: 918, 479 or 703, wherein the modified oligonucleotide comprises
[0220] a gap segment consisting of ten linked deoxynucleosides;
[0221] a 5′ wing segment consisting of five linked nucleosides; and
[0222] a 3′ wing segment consisting of five linked nucleosides;
   wherein the gap segment is positioned between the 5′ wing segment and the 3′ wing segment, wherein each nucleoside of each wing segment comprises a 2′-O-methoxyethyl sugar; wherein each internucleoside linkage is a phosphorothioate linkage and wherein each cytosine is a 5-methylcytosine.

[0223] In certain aspects, the modified oligonucleotide has a nucleobase sequence comprising the sequence recited in SEQ ID NOs: 1800, 1904, 2122, 2127, or 2194, wherein the modified oligonucleotide comprises of nucleosides that have either a MOE sugar modification, an (S)-cEt sugar modification, or a deoxy modification; wherein each internucleoside linkage is a phosphorothioate linkage; and wherein each cytosine is a 5-methylcytosine.

[0224] In certain embodiments, a compound comprises a single-stranded modified oligonucleotide and a conjugate group, wherein the modified oligonucleotide consists of 20 linked nucleosides and has a nucleobase sequence comprising the sequence recited in SEQ ID NOs: 918, 479 or 703, wherein the modified oligonucleotide comprises
[0225] a gap segment consisting of ten linked deoxynucleosides;
[0226] a 5′ wing segment consisting of five linked nucleosides; and
[0227] a 3′ wing segment consisting of five linked nucleosides;
   wherein the gap segment is positioned between the 5′ wing segment and the 3′ wing segment, wherein each nucleoside of each wing segment comprises a 2′-O-methoxyethyl sugar; wherein each internucleoside linkage is a phosphorothioate linkage and wherein each cytosine is a 5-methylcytosine.

[0228] In certain embodiments, a compound comprises a single-stranded modified oligonucleotide and a conjugate group, wherein the modified oligonucleotide consists of 16 linked nucleosides and has a nucleobase sequence comprising the sequence recited in SEQ ID NOs: 1800, 1904, 2122, 2127, or 2194, wherein the modified oligonucleotide comprises of nucleosides that have either a MOE sugar modification, an (S)-cEt sugar modification, or a deoxy modification; wherein each internucleoside linkage is a phosphorothioate linkage; and wherein each cytosine is a 5-methylcytosine.

[0229] In certain embodiments, a compound comprises an ISIS oligonucleotide targeting GHR and a conjugate group. For instance, in certain embodiments, a compound comprises ISIS 532401 and a conjugate group.

[0230] In any of the foregoing embodiments, the compound or oligonucleotide can be at least 80%, at least 81%, at least 82%, at least 83%, at least 84%, at least 85%, at least 86%, at least 87%, at least 88%, at least 89%, at least 90%, at least 91%, at least 92%, at least 93%, at least 94%, at least 95%, at least 96%, at least 97%, at least 98%, at least 99%, or 100% complementary to a nucleic acid encoding growth hormone receptor.

[0231] In any of the foregoing embodiments, the nucleic acid encoding growth hormone receptor can comprise the nucleotide sequence of any one of SEQ ID NOs: 1-19.

[0232] In any of the foregoing embodiments, the compound or oligonucleotide can be single-stranded.

[0233] In any of the foregoing embodiments, the compound or oligonucleotide can be double-stranded.

[0234] In certain embodiments, at least one internucleoside linkage of the modified oligonucleotide is a modified internucleoside linkage.

[0235] In certain embodiments, at least one modified internucleoside linkage of the modified oligonucleotide is a phosphorothioate internucleoside linkage.

[0236] In certain embodiments, the modified oligonucleotide comprises at least 1, 2, 3, 4, 5, 6, or 7 phosphodiester internucleoside linkages.

[0237] In certain embodiments, each internucleoside linkage of the modified oligonucleotide is selected from a phosphodiester internucleoside linkage and a phosphorothioate internucleoside linkage.

[0238] In certain embodiments, each internucleoside linkage of the modified oligonucleotide is a phosphorothioate linkage.

[0239] In certain embodiments, at least one nucleoside of the modified oligonucleotide comprises a modified nucleobase.

[0240] In certain embodiments, the modified nucleobase is a 5-methylcytosine.

[0241] In certain embodiments, the modified oligonucleotide comprises at least one modified sugar.

[0242] In certain embodiments, the modified sugar is a 2′ modified sugar, a BNA, or a THP.

[0243] In certain embodiments, the modified sugar is any of a 2′-O-methoxyethyl, 2′-O-methyl, a constrained ethyl, a LNA, or a 3′-fluoro-HNA.

[0244] In certain embodiments, the compound comprises at least one 2′-O-methoxyethyl nucleoside, 2′-O-methyl nucleoside, constrained ethyl nucleoside, LNA nucleoside, or 3′-fluoro-HNA nucleoside.

[0245] In certain embodiments, the modified oligonucleotide comprises:
[0246] a gap segment consisting of 10 linked deoxynucleosides;
[0247] a 5′ wing segment consisting of 5 linked nucleosides; and
[0248] a 3′ wing segment consisting of 5 linked nucleosides;
   wherein the gap segment is positioned between the 5′ wing segment and the 3′ wing segment and wherein each nucleoside of each wing segment comprises a modified sugar.

[0249] In certain embodiments, the modified oligonucleotide consists of 20 linked nucleosides.

[0250] In certain embodiments, the modified oligonucleotide consists of 19 linked nucleosides.

[0251] In certain embodiments, the modified oligonucleotide consists of 18 linked nucleosides.

[0252] Certain embodiments provide compounds consisting of a conjugate group and a modified oligonucleotide according to the following formula: mCes mCes Aes mCes mCes Tds Tds Tds Gds Gds Gds Tds Gds Ads Ads Tes Aes Ges mCes Ae; wherein,

A=an adenine,
[0253] mC=a 5′-methylcytosine
[0254] G=a guanine,
[0255] T=a thymine,
[0256] e=a 2′-O-methoxyethyl modified nucleoside,
[0257] d=a 2′-deoxynucleoside, and
[0258] s=a phosphorothioate internucleoside linkage.

[0259] In certain embodiments, a compound comprises an ISIS oligonucleotide targeting GHR conjugated to GalNAc on the 5′ end. For instance, in certain embodiments, a compound comprises ISIS 532401 conjugated to GalNAc on the 5′ end. In further embodiments, the compound has the following chemical structure comprising or consisting of ISIS 532401 with 5′-X, wherein X is a conjugate group comprising GalNAc as described herein:

[chemical structure]

wherein X is a conjugate group comprising GalNAc.

[0260] In certain embodiments, a compound comprises an ISIS oligonucleotide targeting GHR conjugated to GalNAc, and wherein each internucleoside linkage of the oligonucleotide is a phosphorothioate linkage. In further embodiments, a compound having the following chemical structure comprises or consists of ISIS 719223 with a 5′-X, wherein X is a conjugate group comprising GalNAc as described herein:

[chemical structure]

[0261] In certain embodiments, a compound comprises an ISIS oligonucleotide targeting GHR conjugated to GalNAc, and wherein each internucleoside linkage of the oligonucleotide is a phosphorothioate linkage or a phosphodiester linkage. In further embodiments, a compound having the following chemical structure comprises or consists of ISIS 719224 with a 5′-X, wherein X is a conjugate group comprising GalNAc as described herein:

[chemical structure]

[0262] In certain embodiments, a compound comprises an ISIS oligonucleotide targeting GHR conjugated to GalNAc, and wherein each internucleoside linkage of the oligonucleotide is a phosphorothioate linkage or a phosphodiester linkage. In further embodiments, a compound having the following chemical structure comprises or consists of ISIS 766720 with a 5′-X, wherein X is a conjugate group comprising GalNAc as described herein:

[chemical structure]

[0263] In certain embodiments, a compound comprises an ISIS oligonucleotide targeting GHR conjugated to GalNAc. In further such embodiments, the compound comprises the sequence of ISIS 532401 conjugated to GalNAc, and is represented by the following chemical structure:

[chemical structure]

wherein either R¹ is —OCH₂CH₂OCH₃ (MOE) and R² is H; or R¹ and R² together form a bridge, wherein R¹ is —O— and R² is —CH₂—, —CH(CH₃)—, or —CH₂CH₂—, and R¹ and R² are directly connected such that the resulting bridge is selected from: —O—CH₂—, —O—CH(CH₃)—, and —O—CH₂CH₂—; and for each pair of R³ and R⁴ on the same ring, independently for each ring: either R³ is selected from H and —OCH₂CH₂OCH₃ and R⁴ is H; or R³ and R⁴ together form a bridge, wherein R³ is —O—, and R⁴ is —CH₂—, —CH(CH₃)—, or —CH₂CH₂— and R³ and R⁴ are directly connected such that the resulting bridge is selected from: —O—CH₂—, —O—CH(CH₃)—, and —O—CH₂CH₂—; and R⁵ is selected from H and —CH₃; and Z is selected from S⁻ and O⁻.

[0264] In certain embodiments, a compound comprises an antisense oligonucleotide having a nucleobase sequence of any of SEQ ID NOs disclosed in WO 2004/078922 and a conjugate group described herein. The nucleobase sequences of all of the aforementioned referenced SEQ ID NOs are incorporated by reference herein. For example, a compound comprises an oligonucleotide disclosed in WO 2004/078922 conjugated to GalNAc, and wherein each internucleoside linkage of the oligonucleotide is a phosphorothioate linkage and has the following chemical structure:

[chemical structure]

[0265] For example, a compound comprises an oligonucleotide disclosed in WO 2004/078922 conjugated to GalNAc, and wherein each internucleoside linkage of the oligonucleotide compound is a phosphorothioate linkage or a phosphodiester linkage, and has the following chemical structure:

[chemical structure]

[0266] Certain embodiments provide a composition comprising the compound of any of the aforementioned embodiments or salt thereof and at least one of a pharmaceutically acceptable carrier or diluent. In certain aspects, the composition has a viscosity less than about 40 centipoise (cP), less than about 30 centipose (cP), less than about 20 centipose (cP), less than about 15 centipose (cP), or less than about 10 centipose (cP). In certain aspects, the composition having any of the aforementioned viscosities comprises a compound provided herein at a concentration of about 100 mg/mL, about 125 mg/mL, about 150 mg/mL, about 175 mg/mL, about 200 mg/mL, about 225 mg/mL, about 250 mg/mL, about 275 mg/mL, or about 300 mg/mL. In certain aspects, the composition having any of the aforementioned viscosities and/or compound concentrations has a temperature of room temperature or about 20° C., about 21° C., about 22° C., about 23° C., about 24° C., about 25° C., about 26° C., about 27° C., about 28° C., about 29° C., or about 30° C.

[0267] Certain embodiments provide a method of treating a disease associated with excess growth hormone in a human comprising administering to the human a therapeutically effective amount of the compound or composition of any of the aforementioned embodiments, thereby treating the disease associated with excess growth hormone. In certain aspects, the disease associated with excess growth hormone is acromegaly. In certain aspects, the treatment reduces IGF-1 levels.

[0268] Certain embodiments provide a method of preventing a disease associated with excess growth hormone in a human comprising administering to the human a therapeutically effective amount of a compound or composition of any of the aforementioned embodiments, thereby preventing the disease associated with excess growth hormone. In certain embodiments, the disease associated with excess growth hormone is acromegaly.

[0269] Certain embodiments provide a method of reducing growth hormone receptor (GHR) levels in a human comprising administering to the human a therapeutically effective amount of the compound or composition of any of the aforementioned embodiments, thereby reducing GHR levels in the human. In certain aspects, the human has a disease associated with excess growth hormone. In certain aspects, the disease associated with excess growth hormone is acromegaly.

[0270] In certain aspects, the foregoing methods comprise co-administering the compound or composition and a second agent. In certain aspects, the compound or composition and the second agent are administered concomitantly.

### Antisense Compounds

[0271] Oligomeric compounds include, but are not limited to, oligonucleotides, oligonucleosides, oligonucleotide analogs, oligonucleotide mimetics, antisense compounds, antisense oligonucleotides, and siRNAs. An oligomeric compound may be “antisense” to a target nucleic acid, meaning that is capable of undergoing hybridization to a target nucleic acid through hydrogen bonding.

[0272] In certain embodiments, an antisense compound has a nucleobase sequence that, when written in the 5′ to 3′ direction, comprises the reverse complement of the target segment of a target nucleic acid to which it is targeted. In certain such embodiments, an antisense oligonucleotide has a nucleobase sequence that, when written in the 5′ to 3′ direction, comprises the reverse complement of the target segment of a target nucleic acid to which it is targeted.

[0273] In certain embodiments, an antisense compound is 10 to 30 subunits in length. In certain embodiments, an antisense compound is 12 to 30 subunits in length. In certain embodiments, an antisense compound is 12 to 22 subunits in length. In certain embodiments, an antisense compound is 14 to 30 subunits in length. In certain embodiments, an antisense compound is 14 to 20 subunits in length. In certain embodiments, an antisense compound is 15 to 30 subunits in length. In certain embodiments, an antisense compound is 15 to 20 subunits in length. In certain embodiments, an antisense compound is 16 to 30 subunits in length. In certain embodiments, an antisense compound is 16 to 20 subunits in length. In certain embodiments, an antisense compound is 17 to 30 subunits in length. In certain embodiments, an antisense compound is 17 to 20 subunits in length. In certain embodiments, an antisense compound is 18 to 30 subunits in length. In certain embodiments, an antisense compound is 18 to 21 subunits in length. In certain embodiments, an antisense compound is 18 to 20 subunits in length. In certain embodiments, an antisense compound is 20 to 30 subunits in length. In other words, such antisense compounds are from 12 to 30 linked subunits, 14 to 30 linked subunits, 14 to 20 subunits, 15 to 30 subunits, 15 to 20 subunits, 16 to 30 subunits, 16 to 20 subunits, 17 to 30 subunits, 17 to 20 subunits, 18 to 30 subunits, 18 to 20 subunits, 18 to 21 subunits, 20 to 30 subunits, or 12 to 22 linked subunits, respectively. In certain embodiments, an antisense compound is 14 subunits in length. In certain embodiments, an antisense compound is 16 subunits in length. In certain embodiments, an antisense compound is 17 subunits in length. In certain embodiments, an antisense compound is 18 subunits in length. In certain embodiments, an antisense compound is 19 subunits in length. In certain embodiments, an antisense compound is 20 subunits in length. In other embodiments, the antisense compound is 8 to 80, 12 to 50, 13 to 30, 13 to 50, 14 to 30, 14 to 50, 15 to 30, 15 to 50, 16 to 30, 16 to 50, 17 to 30, 17 to 50, 18 to 22, 18 to 24, 18 to 30, 18 to 50, 19 to 22, 19 to 30, 19 to 50, or 20 to 30 linked subunits. In certain such embodiments, the antisense compounds are 8, 9, 10, 11, 12, 13, 14, 15, 16, 17, 18, 19, 20, 21, 22, 23, 24, 25, 26, 27, 28, 29, 30, 31, 32, 33, 34, 35, 36, 37, 38, 39, 40, 41, 42, 43, 44, 45, 46, 47, 48, 49, 50, 51, 52, 53, 54, 55, 56, 57, 58, 59, 60, 61, 62, 63, 64, 65, 66, 67, 68, 69, 70, 71, 72, 73, 74, 75, 76, 77, 78, 79, or 80 linked subunits in length, or a range defined by any two of the above values. In some embodiments the antisense compound is an antisense oligonucleotide, and the linked subunits are nucleotides.

[0274] In certain embodiments antisense oligonucleotides may be shortened or truncated. For example, a single subunit may be deleted from the 5′ end (5′ truncation), or alternatively from the 3′ end (3′ truncation). A shortened or truncated antisense compound targeted to a GHR nucleic acid may have two subunits deleted from the 5′ end, or alternatively may have two subunits deleted from the 3′ end, of the antisense compound. Alternatively, the deleted nucleosides may be dispersed throughout the antisense compound, for example, in an antisense compound having one nucleoside deleted from the 5′ end and one nucleoside deleted from the 3′ end.

[0275] When a single additional subunit is present in a lengthened antisense compound, the additional subunit may be located at the 5′ or 3′ end of the antisense compound. When two or more additional subunits are present, the added subunits may be adjacent to each other, for example, in an antisense compound having two subunits added to the 5′ end (5′ addition), or alternatively to the 3′ end (3′ addition), of the antisense compound. Alternatively, the added subunits may be dispersed throughout the antisense compound, for example, in an antisense compound having one subunit added to the 5′ end and one subunit added to the 3′ end.

[0276] It is possible to increase or decrease the length of an antisense compound, such as an antisense oligonucleotide, and/or introduce mismatch bases without eliminating activity. For example, in Woolf et al. (Proc. Natl. Acad. Sci. USA 89:7305-7309, 1992), a series of antisense oligonucleotides 13-25 nucleobases in length were tested for their ability to induce cleavage of a target RNA in an oocyte injection model. Antisense oligonucleotides 25 nucleobases in length with 8 or 11 mismatch bases near the ends of the antisense oligonucleotides were able to direct specific cleavage of the target mRNA, albeit to a lesser extent than the antisense oligonucleotides that contained no mismatches. Similarly, target specific cleavage was achieved using 13 nucleobase antisense oligonucleotides, including those with 1 or 3 mismatches.

[0277] Gautschi et al. (J. Natl. Cancer Inst. 93:463-471, March 2001) demonstrated the ability of an oligonucleotide having 100% complementarity to the bcl-2 mRNA and having 3 mismatches to the bcl-xL mRNA to reduce the expression of both bcl-2 and bcl-xL in vitro and in vivo. Furthermore, this oligonucleotide demonstrated potent anti-tumor activity in vivo.

[0278] Maher and Dolnick (Nuc. Acid. Res. 16:3341-3358, 1988) tested a series of tandem 14 nucleobase antisense oligonucleotides, and a 28 and 42 nucleobase antisense oligonucleotides comprised of the sequence of two or three of the tandem antisense oligonucleotides, respectively, for their ability to arrest translation of human DHFR in a rabbit reticulocyte assay. Each of the three 14 nucleobase antisense oligonucleotides alone was able to inhibit translation, albeit at a more modest level than the 28 or 42 nucleobase antisense oligonucleotides.

### Certain Antisense Compound Motifs and Mechanisms

[0279] In certain embodiments, antisense compounds have chemically modified subunits arranged in patterns, or motifs, to confer to the antisense compounds properties such as enhanced inhibitory activity, increased binding affinity for a target nucleic acid, or resistance to degradation by in vivo nucleases.

[0280] Chimeric antisense compounds typically contain at least one region modified so as to confer increased resistance to nuclease degradation, increased cellular uptake, increased binding affinity for the target nucleic acid, and/or increased inhibitory activity. A second region of a chimeric antisense compound may confer another desired property e.g., serve as a substrate for the cellular endonuclease RNase H, which cleaves the RNA strand of an RNA:DNA duplex.

[0281] Antisense activity may result from any mechanism involving the hybridization of the antisense compound (e.g., oligonucleotide) with a target nucleic acid, wherein the hybridization ultimately results in a biological effect. In certain embodiments, the amount and/or activity of the target nucleic acid is modulated. In certain embodiments, the amount and/or activity of the target nucleic acid is reduced. In certain embodiments, hybridization of the antisense compound to the target nucleic acid ultimately results in target nucleic acid degradation. In certain embodiments, hybridization of the antisense compound to the target nucleic acid does not result in target nucleic acid degradation. In certain such embodiments, the presence of the antisense compound hybridized with the target nucleic acid (occupancy) results in a modulation of antisense activity. In certain embodiments, antisense compounds having a particular chemical motif or pattern of chemical modifications are particularly suited to exploit one or more mechanisms. In certain embodiments, antisense compounds function through more than one mechanism and/or through mechanisms that have not been elucidated. Accordingly, the antisense compounds described herein are not limited by particular mechanism.

[0282] Antisense mechanisms include, without limitation, RNase H mediated antisense; RNAi mechanisms, which utilize the RISC pathway and include, without limitation, siRNA, ssRNA and microRNA mechanisms; and occupancy based mechanisms. Certain antisense compounds may act through more than one such mechanism and/or through additional mechanisms.

### RNase H-Mediated Antisense

[0283] In certain embodiments, antisense activity results at least in part from degradation of target RNA by RNase H. RNase H is a cellular endonuclease that cleaves the RNA strand of an RNA:DNA duplex. It is known in the art that single-stranded antisense compounds which are “DNA-like” elicit RNase H activity in mammalian cells. Accordingly, antisense compounds comprising at least a portion of DNA or DNA-like nucleosides may activate RNase H, resulting in cleavage of the target nucleic acid. In certain embodiments, antisense compounds that utilize RNase H comprise one or more modified nucleosides. In certain embodiments, such antisense compounds comprise at least one block of 1-8 modified nucleosides. In certain such embodiments, the modified nucleosides do not support RNase H activity. In certain embodiments, such antisense compounds are gapmers, as described herein. In certain such embodiments, the gap of the gapmer comprises DNA nucleosides. In certain such embodiments, the gap of the gapmer comprises DNA-like nucleosides. In certain such embodiments, the gap of the gapmer comprises DNA nucleosides and DNA-like nucleosides.

[0284] Certain antisense compounds having a gapmer motif are considered chimeric antisense compounds. In a gapmer an internal region having a plurality of nucleotides that supports RNaseH cleavage is positioned between external regions having a plurality of nucleotides that are chemically distinct from the nucleosides of the internal region. In the case of an antisense oligonucleotide having a gapmer motif, the gap segment generally serves as the substrate for endonuclease cleavage, while the wing segments comprise modified nucleosides. In certain embodiments, the regions of a gapmer are differentiated by the types of sugar moieties comprising each distinct region. The types of sugar moieties that are used to differentiate the regions of a gapmer may in some embodiments include β-D-ribonucleosides, β-D-deoxyribonucleosides, 2′-modified nucleosides (such 2′-modified nucleosides may include 2′-MOE and 2′-O—CH₃, among others), and bicyclic sugar modified nucleosides (such bicyclic sugar modified nucleosides may include those having a constrained ethyl). In certain embodiments, nucleosides in the wings may include several modified sugar moieties, including, for example 2′-MOE and bicyclic sugar moieties such as constrained ethyl or LNA. In certain embodiments, wings may include several modified and unmodified sugar moieties. In certain embodiments, wings may include various combinations of 2′-MOE nucleosides, bicyclic sugar moieties such as constrained ethyl nucleosides or LNA nucleosides, and 2′-deoxynucleosides.

[0285] Each distinct region may comprise uniform sugar moieties, variant, or alternating sugar moieties. The wing-gap-wing motif is frequently described as “X—Y—Z”, where “X” represents the length of the 5′-wing, “Y” represents the length of the gap, and “Z” represents the length of the 3′-wing. “X” and “Z” may comprise uniform, variant, or alternating sugar moieties. In certain embodiments, “X” and “Y” may include one or more 2′-deoxynucleosides. “Y” may comprise 2′-deoxynucleosides. As used herein, a gapmer described as “X—Y—Z” has a configuration such that the gap is positioned immediately adjacent to each of the 5′-wing and the 3′ wing. Thus, no intervening nucleotides exist between the 5′-wing and gap, or the gap and the 3′-wing. Any of the antisense compounds described herein can have a gapmer motif. In certain embodiments, “X” and “Z” are the same; in other embodiments they are different. In certain embodiments, “Y” is between 8 and 15 nucleosides. X, Y, or Z can be any of 1, 2, 3, 4, 5, 6, 7, 8, 9, 10, 11, 12, 13, 14, 15, 16, 17, 18, 19, 20, 25, 30 or more nucleosides.

[0286] In certain embodiments, the antisense compound targeted to a GHR nucleic acid has a gapmer motif in which the gap consists of 6, 7, 8, 9, 10, 11, 12, 13, 14, 15, or 16 linked nucleosides.

[0287] In certain embodiments, the antisense oligonucleotide has a sugar motif described by Formula A as follows: (J)ₘ-(B)ₙ-(J)ₚ-(B)ᵣ-(A)ₜ-(D)_{g}-(A)ᵥ-(B)_{w}-(J)ₓ-(B)_{y}-(J)_{z}
[0288] wherein:
[0289] each A is independently a 2′-substituted nucleoside;
[0290] each B is independently a bicyclic nucleoside;
[0291] each J is independently either a 2′-substituted nucleoside or a 2′-deoxynucleoside;
[0292] each D is a 2′-deoxynucleoside;
[0293] m is 0-4; n is 0-2; p is 0-2; r is 0-2; t is 0-2; v is 0-2; w is 0-4; x is 0-2; y is 0-2; z is 0-4; g is 6-14;
   provided that:
[0294] at least one of m, n, and r is other than 0;

[0295] at least one of w and y is other than 0;

[0296] the sum of m, n, p, r, and t is from 2 to 5; and

[0297] the sum of v, w, x, y, and z is from 2 to 5.

### RNAi Compounds

[0298] In certain embodiments, antisense compounds are interfering RNA compounds (RNAi), which include double-stranded RNA compounds (also referred to as short-interfering RNA or siRNA) and single-stranded RNAi compounds (or ssRNA). Such compounds work at least in part through the RISC pathway to degrade and/or sequester a target nucleic acid (thus, include microRNA/microRNA-mimic compounds). In certain embodiments, antisense compounds comprise modifications that make them particularly suited for such mechanisms.

[0299] i. ssRNA Compounds

[0300] In certain embodiments, antisense compounds including those particularly suited for use as single-stranded RNAi compounds (ssRNA) comprise a modified 5′-terminal end. In certain such embodiments, the 5′-terminal end comprises a modified phosphate moiety. In certain embodiments, such modified phosphate is stabilized (e.g., resistant to degradation/cleavage compared to unmodified 5′-phosphate). In certain embodiments, such 5′-terminal nucleosides stabilize the 5′-phosphorous moiety. Certain modified 5′-terminal nucleosides may be found in the art, for example in WO/2011/139702.

[0301] In certain embodiments, the 5′-nucleoside of an ssRNA compound has Formula IIc:

[chemical structure]

wherein:
[0302] T₁ is an optionally protected phosphorus moiety;
[0303] T₂ is an internucleoside linking group linking the compound of Formula IIc to the oligomeric compound;
[0304] A has one of the formulas:

[chemical structure]

[0305] Q₁ and Q₂ are each, independently, H, halogen, C₁-C₆ alkyl, substituted C₁-C₆ alkyl, C₁-C₆ alkoxy, substituted C₁-C₆ alkoxy, C₂-C₆ alkenyl, substituted C₂-C₆ alkenyl, C₂-C₆ alkynyl, substituted C₂-C₆ alkynyl or N(R₃)(R₄);
[0306] Q₃ is O, S, N(R₅) or C(R₆)(R₇);
[0307] each R₃, R₄ R₅, R₆ and R₇ is, independently, H, C₁-C₆ alkyl, substituted C₁-C₆ alkyl or C₁-C₆ alkoxy;
[0308] M₃ is O, S, NR₁₄, C(R₁₅)(R₁₆), C(R₁₅)(R₁₆)C(R₁₇)(R₁₈), C(R₁₅)═C(R₁₇), OC(R₁₅)(R₁₆) or OC(R₁₅)(Bx₂);
[0309] R₁₄ is H, C₁-C₆ alkyl, substituted C₁-C₆ alkyl, C₁-C₆ alkoxy, substituted C₁-C₆ alkoxy, C₂-C₆ alkenyl, substituted C₂-C₆ alkenyl, C₂-C₆ alkynyl or substituted C₂-C₆ alkynyl;
[0310] R₁₅, R₁₆, R₁₇ and R₁₈ are each, independently, H, halogen, C₁-C₆ alkyl, substituted C₁-C₆ alkyl, C₁-C₆ alkoxy, substituted C₁-C₆ alkoxy, C₂-C₆ alkenyl, substituted C₂-C₆ alkenyl, C₂-C₆ alkynyl or substituted C₂-C₆ alkynyl;
[0311] Bx₁ is a heterocyclic base moiety;
[0312] or if Bx₂ is present then Bx₂ is a heterocyclic base moiety and Bx₁ is H, halogen, C₁-C₆ alkyl, substituted C₁-C₆ alkyl, C₁-C₆ alkoxy, substituted C₁-C₆ alkoxy, C₂-C₆ alkenyl, substituted C₂-C₆ alkenyl, C₂-C₆ alkynyl or substituted C₂-C₆ alkynyl;
[0313] J₄, J₅, J₆ and J₇ are each, independently, H, halogen, C₁-C₆ alkyl, substituted C₁-C₆ alkyl, C₁-C₆ alkoxy, substituted C₁-C₆ alkoxy, C₂-C₆ alkenyl, substituted C₂-C₆ alkenyl, C₂-C₆ alkynyl or substituted C₂-C₆ alkynyl;
[0314] or J₄ forms a bridge with one of J₅ or J₇ wherein said bridge comprises from 1 to 3 linked biradical groups selected from O, S, NR₁₉, C(R₂₀)(R₂₁), C(R₂₀)═C(R₂₁), C[═C(R₂₀)(R₂₁)] and C(═O) and the other two of J₅, J₆ and J₇ are each, independently, H, halogen, C₁-C₆ alkyl, substituted C₁-C₆ alkyl, C₁-C₆ alkoxy, substituted C₁-C₆ alkoxy, C₂-C₆ alkenyl, substituted C₂-C₆ alkenyl, C₂-C₆ alkynyl or substituted C₂-C₆ alkynyl;
[0315] each R₁₉, R₂₀ and R₂₁ is, independently, H, C₁-C₆ alkyl, substituted C₁-C₆ alkyl, C₁-C₆ alkoxy, substituted C₁-C₆ alkoxy, C₂-C₆ alkenyl, substituted C₂-C₆ alkenyl, C₂-C₆ alkynyl or substituted C₂-C₆ alkynyl;
[0316] G is H, OH, halogen or O—[C(R₈)(R₉)]ₙ—[(C═O)ₘ—X₁]ⱼ—Z;
[0317] each R₈ and R₉ is, independently, H, halogen, C₁-C₆ alkyl or substituted C₁-C₆ alkyl;
[0318] X₁ is O, S or N(E₁);
[0319] Z is H, halogen, C₁-C₆ alkyl, substituted C₁-C₆ alkyl, C₂-C₆ alkenyl, substituted C₂-C₆ alkenyl, C₂-C₆ alkynyl, substituted C₂-C₆ alkynyl or N(E₂)(E₃);
[0320] E₁, E₂ and E₃ are each, independently, H, C₁-C₆ alkyl or substituted C₁-C₆ alkyl;
[0321] n is from 1 to about 6;
[0322] m is 0 or 1;
[0323] j is 0 or 1;
[0324] each substituted group comprises one or more optionally protected substituent groups independently selected from halogen, OJ₁, N(J₁)(J₂), ═NJ₁, SJ₁, N₃, CN, OC(═X₂)J₁, OC(═X₂)N(J₁)(J₂) and C(═X₂)N(J₁)(J₂);
[0325] X₂ is O, S or NJ₃;
[0326] each J₁, J₂ and J₃ is, independently, H or C₁-C₆ alkyl;
[0327] when j is 1 then Z is other than halogen or N(E₂)(E₃); and
[0328] wherein said oligomeric compound comprises from 8 to 40 monomeric subunits and is hybridizable to at least a portion of a target nucleic acid.

[0329] In certain embodiments, M₃ is O, CH═CH, OCH₂ or OC(H)(Bx₂). In certain embodiments, M₃ is O.

[0330] In certain embodiments, J₄, J₅, J₆ and J₇ are each H. In certain embodiments, J₄ forms a bridge with one of J₅ or J₇.

[0331] In certain embodiments, A has one of the formulas:

[chemical structure]

wherein:
[0332] Q₁ and Q₂ are each, independently, H, halogen, C₁-C₆ alkyl, substituted C₁-C₆ alkyl, C₁-C₆ alkoxy or substituted C₁-C₆ alkoxy. In certain embodiments, Q₁ and Q₂ are each H. In certain embodiments, Q₁ and Q₂ are each, independently, H or halogen. In certain embodiments, Q₁ and Q₂ is H and the other of Q₁ and Q₂ is F, CH₃ or OCH₃.

[0333] In certain embodiments, T₁ has the formula:

[chemical structure]

wherein:
[0334] Rₐ and R_{c} are each, independently, protected hydroxyl, protected thiol, C₁-C₆ alkyl, substituted C₁-C₆ alkyl, C₁-C₆ alkoxy, substituted C₁-C₆ alkoxy, protected amino or substituted amino; and
[0335] R_{b} is O or S. In certain embodiments, R_{b} is O and Rₐ and R_{c} are each, independently, OCH₃, OCH₂CH₃ or CH(CH₃)₂.

[0336] In certain embodiments, G is halogen, OCH₃, OCH₂F, OCHF₂, OCF₃, OCH₂CH₃, O(CH₂)₂F, OCH₂CHF₂, OCH₂CF₃, OCH₂—CH—CH₂, O(CH₂)₂—OCH₃, O(CH₂)₂—SCH₃, O(CH₂)₂—OCF₃, O(CH₂)₃—N(R₁₀)(R₁₁), O(CH₂)₂—ON(R₁₀)(R₁₁), O(CH₂)₂—O(CH₂)₂—N(R₁₀)(R₁₁), OCH₂C(═O)—N(R₁₀)(R₁₁), OCH₂C(═O)—N(R₁₂)—(CH₂)₂—N(R₁₀)(R₁₁) or O(CH₂)₂—N(R₁₂)—C(═NR₁₃)[N(R₁₀)(R₁₁)] wherein R₁₀, R₁₁, R₁₂ and R₁₃ are each, independently, H or C₁-C₆ alkyl. In certain embodiments, G is halogen, OCH₃, OCF₃, OCH₂CH₃, OCH₂CF₃, OCH₂—CH═CH₂, O(CH₂)₂—OCH₃, O(CH₂)₂—O(CH₂)₂—N(CH₃)₂, OCH₂C(═O)—N(H)CH₃, OCH₂C(═O)—N(H)—(CH₂)₂—N(CH₃)₂ or OCH₂—N(H)—C(═NH)NH₂. In certain embodiments, G is F, OCH₃ or O(CH₂)₂—OCH₃. In certain embodiments, G is O(CH₂)₂—OCH₃.

[0337] In certain embodiments, the 5′-terminal nucleoside has Formula IIe:

[chemical structure]

[0338] In certain embodiments, antisense compounds, including those particularly suitable for ssRNA comprise one or more type of modified sugar moieties and/or naturally occurring sugar moieties arranged along an oligonucleotide or region thereof in a defined pattern or sugar modification motif. Such motifs may include any of the sugar modifications discussed herein and/or other known sugar modifications.

[0339] In certain embodiments, the oligonucleotides comprise or consist of a region having uniform sugar modifications. In certain such embodiments, each nucleoside of the region comprises the same RNA-like sugar modification. In certain embodiments, each nucleoside of the region is a 2′-F nucleoside. In certain embodiments, each nucleoside of the region is a 2′-OMe nucleoside. In certain embodiments, each nucleoside of the region is a 2′-MOE nucleoside. In certain embodiments, each nucleoside of the region is a cEt nucleoside. In certain embodiments, each nucleoside of the region is an LNA nucleoside. In certain embodiments, the uniform region constitutes all or essentially all of the oligonucleotide. In certain embodiments, the region constitutes the entire oligonucleotide except for 1-4 terminal nucleosides.

[0340] In certain embodiments, oligonucleotides comprise one or more regions of alternating sugar modifications, wherein the nucleosides alternate between nucleotides having a sugar modification of a first type and nucleotides having a sugar modification of a second type. In certain embodiments, nucleosides of both types are RNA-like nucleosides. In certain embodiments the alternating nucleosides are selected from: 2′-OMe, 2′-F, 2′-MOE, LNA, and cEt. In certain embodiments, the alternating modifications are 2′-F and 2′-OMe. Such regions may be contiguous or may be interrupted by differently modified nucleosides or conjugated nucleosides.

[0341] In certain embodiments, the alternating region of alternating modifications each consist of a single nucleoside (i.e., the pattern is (AB)ₓA_{y} wherein A is a nucleoside having a sugar modification of a first type and B is a nucleoside having a sugar modification of a second type; x is 1-20 and y is 0 or 1). In certain embodiments, one or more alternating regions in an alternating motif includes more than a single nucleoside of a type. For example, oligonucleotides may include one or more regions of any of the following nucleoside motifs:

### AABBAA;

### ABBABB;

### AABAAB;

### ABBABAABB;

### ABABAA;

### AABABAB;

### ABABAA;

### ABBAABBABABAA;

### BABBAABBABABAA; or

### ABABBAABBABABAA;

[0342] wherein A is a nucleoside of a first type and B is a nucleoside of a second type. In certain embodiments, A and B are each selected from 2′-F, 2′-OMe, BNA, and MOE.

[0343] In certain embodiments, oligonucleotides having such an alternating motif also comprise a modified 5′ terminal nucleoside, such as those of formula IIc or IIe.

[0344] In certain embodiments, oligonucleotides comprise a region having a 2-2-3 motif. Such regions comprises the following motif:

-(A)₂-(B))ₓ-(A)₂-(C)_{y}(A)₃-
[0345] wherein: A is a first type of modified nucleoside;
[0346] B and C, are nucleosides that are differently modified than A, however, B and C may have the same or different modifications as one another;
[0347] x and y are from 1 to 15.

[0348] In certain embodiments, A is a 2′-OMe modified nucleoside. In certain embodiments, B and C are both 2′-F modified nucleosides. In certain embodiments, A is a 2′-OMe modified nucleoside and B and C are both 2′-F modified nucleosides.

[0349] In certain embodiments, oligonucleosides have the following sugar motif:

5′-(Q)-(AB)ₓA_{y}-(D)_{z}

wherein:
[0350] Q is a nucleoside comprising a stabilized phosphate moiety. In certain embodiments, Q is a nucleoside having Formula IIc or IIe;
[0351] A is a first type of modified nucleoside;
[0352] B is a second type of modified nucleoside;
[0353] D is a modified nucleoside comprising a modification different from the nucleoside adjacent to it.
   Thus, if y is 0, then D must be differently modified than B and if y is 1, then D must be differently modified than A. In certain embodiments, D differs from both A and B.
[0354] X is 5-15;
[0355] Y is 0 or 1;
[0356] Z is 0-4.

[0357] In certain embodiments, oligonucleosides have the following sugar motif:

5′-(Q)-(A)ₓ-(D)_{z}

wherein:
[0358] Q is a nucleoside comprising a stabilized phosphate moiety. In certain embodiments, Q is a nucleoside having Formula IIc or He;
[0359] A is a first type of modified nucleoside;
[0360] D is a modified nucleoside comprising a modification different from A.
[0361] X is 11-30;
[0362] Z is 0-4.

[0363] In certain embodiments A, B, C, and D in the above motifs are selected from: 2′-OMe, 2′-F, 2′-MOE, LNA, and cEt. In certain embodiments, D represents terminal nucleosides. In certain embodiments, such terminal nucleosides are not designed to hybridize to the target nucleic acid (though one or more might hybridize by chance). In certain embodiments, the nucleobase of each D nucleoside is adenine, regardless of the identity of the nucleobase at the corresponding position of the target nucleic acid. In certain embodiments the nucleobase of each D nucleoside is thymine.

[0364] In certain embodiments, antisense compounds, including those particularly suited for use as ssRNA comprise modified internucleoside linkages arranged along the oligonucleotide or region thereof in a defined pattern or modified internucleoside linkage motif. In certain embodiments, oligonucleotides comprise a region having an alternating internucleoside linkage motif. In certain embodiments, oligonucleotides comprise a region of uniformly modified internucleoside linkages. In certain such embodiments, the oligonucleotide comprises a region that is uniformly linked by phosphorothioate internucleoside linkages. In certain embodiments, the oligonucleotide is uniformly linked by phosphorothioate internucleoside linkages. In certain embodiments, each internucleoside linkage of the oligonucleotide is selected from phosphodiester and phosphorothioate. In certain embodiments, each internucleoside linkage of the oligonucleotide is selected from phosphodiester and phosphorothioate and at least one internucleoside linkage is phosphorothioate.

[0365] In certain embodiments, the oligonucleotide comprises at least 6 phosphorothioate internucleoside linkages. In certain embodiments, the oligonucleotide comprises at least 8 phosphorothioate internucleoside linkages. In certain embodiments, the oligonucleotide comprises at least 10 phosphorothioate internucleoside linkages. In certain embodiments, the oligonucleotide comprises at least one block of at least 6 consecutive phosphorothioate internucleoside linkages. In certain embodiments, the oligonucleotide comprises at least one block of at least 8 consecutive phosphorothioate internucleoside linkages. In certain embodiments, the oligonucleotide comprises at least one block of at least 10 consecutive phosphorothioate internucleoside linkages. In certain embodiments, the oligonucleotide comprises at least one block of at least one 12 consecutive phosphorothioate internucleoside linkages. In certain such embodiments, at least one such block is located at the 3′ end of the oligonucleotide. In certain such embodiments, at least one such block is located within 3 nucleosides of the 3′ end of the oligonucleotide.

[0366] Oligonucleotides having any of the various sugar motifs described herein, may have any linkage motif. For example, the oligonucleotides, including but not limited to those described above, may have a linkage motif selected from non-limiting the table below:

| 5′ most linkage | Central region | 3′-region |
|---|---|---|
| PS | Alternating PO/PS | 6 PS |
| PS | Alternating PO/PS | 7 PS |
| PS | Alternating PO/PS | 8 PS |

[0367] ii. siRNA Compounds

[0368] In certain embodiments, antisense compounds are double-stranded RNAi compounds (siRNA). In such embodiments, one or both strands may comprise any modification motif described above for ssRNA. In certain embodiments, ssRNA compounds may be unmodified RNA. In certain embodiments, siRNA compounds may comprise unmodified RNA nucleosides, but modified internucleoside linkages.

[0369] Several embodiments relate to double-stranded compositions wherein each strand comprises a motif defined by the location of one or more modified or unmodified nucleosides. In certain embodiments, compositions are provided comprising a first and a second oligomeric compound that are fully or at least partially hybridized to form a duplex region and further comprising a region that is complementary to and hybridizes to a nucleic acid target. It is suitable that such a composition comprise a first oligomeric compound that is an antisense strand having full or partial complementarity to a nucleic acid target and a second oligomeric compound that is a sense strand having one or more regions of complementarity to and forming at least one duplex region with the first oligomeric compound.

[0370] The compositions of several embodiments modulate gene expression by hybridizing to a nucleic acid target resulting in loss of its normal function. In some embodiments, the target nucleic acid is GHR. In certain embodiment, the degradation of the targeted GHR is facilitated by an activated RISC complex that is formed with compositions of the invention.

[0371] Several embodiments are directed to double-stranded compositions wherein one of the strands is useful in, for example, influencing the preferential loading of the opposite strand into the RISC (or cleavage) complex. The compositions are useful for targeting selected nucleic acid molecules and modulating the expression of one or more genes. In some embodiments, the compositions of the present invention hybridize to a portion of a target RNA resulting in loss of normal function of the target RNA.

[0372] Certain embodiments are drawn to double-stranded compositions wherein both the strands comprises a hemimer motif, a fully modified motif, a positionally modified motif or an alternating motif. Each strand of the compositions of the present invention can be modified to fulfil a particular role in for example the siRNA pathway. Using a different motif in each strand or the same motif with different chemical modifications in each strand permits targeting the antisense strand for the RISC complex while inhibiting the incorporation of the sense strand. Within this model, each strand can be independently modified such that it is enhanced for its particular role. The antisense strand can be modified at the 5′-end to enhance its role in one region of the RISC while the 3′-end can be modified differentially to enhance its role in a different region of the RISC.

[0373] The double-stranded oligonucleotide molecules can be a double-stranded polynucleotide molecule comprising self-complementary sense and antisense regions, wherein the antisense region comprises nucleotide sequence that is complementary to nucleotide sequence in a target nucleic acid molecule or a portion thereof and the sense region having nucleotide sequence corresponding to the target nucleic acid sequence or a portion thereof. The double-stranded oligonucleotide molecules can be assembled from two separate oligonucleotides, where one strand is the sense strand and the other is the antisense strand, wherein the antisense and sense strands are self-complementary (i.e. each strand comprises nucleotide sequence that is complementary to nucleotide sequence in the other strand; such as where the antisense strand and sense strand form a duplex or double-stranded structure, for example wherein the double-stranded region is about 15 to about 30, e.g., about 15, 16, 17, 18, 19, 20, 21, 22, 23, 24, 25, 26, 27, 28, 29 or 30 base pairs; the antisense strand comprises nucleotide sequence that is complementary to nucleotide sequence in a target nucleic acid molecule or a portion thereof and the sense strand comprises nucleotide sequence corresponding to the target nucleic acid sequence or a portion thereof (e.g., about 15 to about 25 or more nucleotides of the double-stranded oligonucleotide molecule are complementary to the target nucleic acid or a portion thereof). Alternatively, the double-stranded oligonucleotide is assembled from a single oligonucleotide, where the self-complementary sense and antisense regions of the siRNA are linked by means of a nucleic acid based or non-nucleic acid-based linker(s).

[0374] The double-stranded oligonucleotide can be a polynucleotide with a duplex, asymmetric duplex, hairpin or asymmetric hairpin secondary structure, having self-complementary sense and antisense regions, wherein the antisense region comprises nucleotide sequence that is complementary to nucleotide sequence in a separate target nucleic acid molecule or a portion thereof and the sense region having nucleotide sequence corresponding to the target nucleic acid sequence or a portion thereof. The double-stranded oligonucleotide can be a circular single-stranded polynucleotide having two or more loop structures and a stem comprising self-complementary sense and antisense regions, wherein the antisense region comprises nucleotide sequence that is complementary to nucleotide sequence in a target nucleic acid molecule or a portion thereof and the sense region having nucleotide sequence corresponding to the target nucleic acid sequence or a portion thereof, and wherein the circular polynucleotide can be processed either in vivo or in vitro to generate an active siRNA molecule capable of mediating RNAi.

[0375] In certain embodiments, the double-stranded oligonucleotide comprises separate sense and antisense sequences or regions, wherein the sense and antisense regions are covalently linked by nucleotide or non-nucleotide linkers molecules as is known in the art, or are alternately non-covalently linked by ionic interactions, hydrogen bonding, van der waals interactions, hydrophobic interactions, and/or stacking interactions. In certain embodiments, the double-stranded oligonucleotide comprises nucleotide sequence that is complementary to nucleotide sequence of a target gene. In another embodiment, the double-stranded oligonucleotide interacts with nucleotide sequence of a target gene in a manner that causes inhibition of expression of the target gene.

[0376] As used herein, double-stranded oligonucleotides need not be limited to those molecules containing only RNA, but further encompasses chemically modified nucleotides and non-nucleotides. In certain embodiments, the short interfering nucleic acid molecules lack 2′-hydroxy (2′-OH) containing nucleotides. In certain embodiments short interfering nucleic acids optionally do not include any ribonucleotides (e.g., nucleotides having a 2′-OH group). Such double-stranded oligonucleotides that do not require the presence of ribonucleotides within the molecule to support RNAi can however have an attached linker or linkers or other attached or associated groups, moieties, or chains containing one or more nucleotides with 2′-OH groups.

[0377] Optionally, double-stranded oligonucleotides can comprise ribonucleotides at about 5, 10, 20, 30, 40, or 50% of the nucleotide positions. As used herein, the term siRNA is meant to be equivalent to other terms used to describe nucleic acid molecules that are capable of mediating sequence specific RNAi, for example short interfering RNA (siRNA), double-stranded RNA (dsRNA), micro-RNA (miRNA), short hairpin RNA (shRNA), short interfering oligonucleotide, short interfering nucleic acid, short interfering modified oligonucleotide, chemically modified siRNA, post-transcriptional gene silencing RNA (ptgsRNA), and others. In addition, as used herein, the term RNAi is meant to be equivalent to other terms used to describe sequence specific RNA interference, such as post transcriptional gene silencing, translational inhibition, or epigenetics. For example, double-stranded oligonucleotides can be used to epigenetically silence genes at both the post-transcriptional level and the pre-transcriptional level. In a non-limiting example, epigenetic regulation of gene expression by siRNA molecules of the invention can result from siRNA mediated modification of chromatin structure or methylation pattern to alter gene expression (see, for example, Verdel et al., 2004, Science, 303, 672-676; Pal-Bhadra et al., 2004, Science, 303, 669-672; Allshire, 2002, Science, 297, 1818-1819; Volpe et al., 2002, Science, 297, 1833-1837; Jenuwein, 2002, Science, 297, 2215-2218; and Hall et al., 2002, Science, 297, 2232-2237).

[0378] It is contemplated that compounds and compositions of several embodiments provided herein can target GHR by a dsRNA-mediated gene silencing or RNAi mechanism, including, e.g., “hairpin” or stem-loop double-stranded RNA effector molecules in which a single RNA strand with self-complementary sequences is capable of assuming a double-stranded conformation, or duplex dsRNA effector molecules comprising two separate strands of RNA. In various embodiments, the dsRNA consists entirely of ribonucleotides or consists of a mixture of ribonucleotides and deoxynucleotides, such as the RNA/DNA hybrids disclosed, for example, by WO 00/63364, filed Apr. 19, 2000, or U.S. Ser. No. 60/130,377, filed Apr. 21, 1999. The dsRNA or dsRNA effector molecule may be a single molecule with a region of self-complementarity such that nucleotides in one segment of the molecule base pair with nucleotides in another segment of the molecule. In various embodiments, a dsRNA that consists of a single molecule consists entirely of ribonucleotides or includes a region of ribonucleotides that is complementary to a region of deoxyribonucleotides. Alternatively, the dsRNA may include two different strands that have a region of complementarity to each other.

[0379] In various embodiments, both strands consist entirely of ribonucleotides, one strand consists entirely of ribonucleotides and one strand consists entirely of deoxyribonucleotides, or one or both strands contain a mixture of ribonucleotides and deoxyribonucleotides. In certain embodiments, the regions of complementarity are at least 70, 80, 90, 95, 98, or 100% complementary to each other and to a target nucleic acid sequence. In certain embodiments, the region of the dsRNA that is present in a double-stranded conformation includes at least 19, 20, 21, 22, 23, 24, 25, 26, 27, 28, 29, 30, 50, 75, 100, 200, 500, 1000, 2000 or 5000 nucleotides or includes all of the nucleotides in a cDNA or other target nucleic acid sequence being represented in the dsRNA. In some embodiments, the dsRNA does not contain any single stranded regions, such as single stranded ends, or the dsRNA is a hairpin. In other embodiments, the dsRNA has one or more single stranded regions or overhangs. In certain embodiments, RNA/DNA hybrids include a DNA strand or region that is an antisense strand or region (e.g, has at least 70, 80, 90, 95, 98, or 100% complementarity to a target nucleic acid) and an RNA strand or region that is a sense strand or region (e.g, has at least 70, 80, 90, 95, 98, or 100% identity to a target nucleic acid), and vice versa.

[0380] In various embodiments, the RNA/DNA hybrid is made in vitro using enzymatic or chemical synthetic methods such as those described herein or those described in WO 00/63364, filed Apr. 19, 2000, or U.S. Ser. No. 60/130,377, filed Apr. 21, 1999. In other embodiments, a DNA strand synthesized in vitro is complexed with an RNA strand made in vivo or in vitro before, after, or concurrent with the transformation of the DNA strand into the cell. In yet other embodiments, the dsRNA is a single circular nucleic acid containing a sense and an antisense region, or the dsRNA includes a circular nucleic acid and either a second circular nucleic acid or a linear nucleic acid (see, for example, WO 00/63364, filed Apr. 19, 2000, or U.S. Ser. No. 60/130,377, filed Apr. 21, 1999.) Exemplary circular nucleic acids include lariat structures in which the free 5′ phosphoryl group of a nucleotide becomes linked to the 2′ hydroxyl group of another nucleotide in a loop back fashion.

[0381] In other embodiments, the dsRNA includes one or more modified nucleotides in which the 2′ position in the sugar contains a halogen (such as fluorine group) or contains an alkoxy group (such as a methoxy group) which increases the half-life of the dsRNA in vitro or in vivo compared to the corresponding dsRNA in which the corresponding 2′ position contains a hydrogen or an hydroxyl group. In yet other embodiments, the dsRNA includes one or more linkages between adjacent nucleotides other than a naturally-occurring phosphodiester linkage. Examples of such linkages include phosphoramide, phosphorothioate, and phosphorodithioate linkages. The dsRNAs may also be chemically modified nucleic acid molecules as taught in U.S. Pat. No. 6,673,661. In other embodiments, the dsRNA contains one or two capped strands, as disclosed, for example, by WO 00/63364, filed Apr. 19, 2000, or U.S. Ser. No. 60/130,377, filed Apr. 21, 1999.

[0382] In other embodiments, the dsRNA can be any of the at least partially dsRNA molecules disclosed in WO 00/63364, as well as any of the dsRNA molecules described in U.S. Provisional Application 60/399,998; and U.S. Provisional Application 60/419,532, and PCT/US2003/033466, published on Apr. 29, 2004 as WO 2004/035765, the teaching of which is hereby incorporated by reference. Any of the dsRNAs may be expressed in vitro or in vivo using the methods described herein or standard methods, such as those described in WO 00/63364.

### Occupancy

[0383] In certain embodiments, antisense compounds are not expected to result in cleavage or the target nucleic acid via RNase H or to result in cleavage or sequestration through the RISC pathway. In certain such embodiments, antisense activity may result from occupancy, wherein the presence of the hybridized antisense compound disrupts the activity of the target nucleic acid. In certain such embodiments, the antisense compound may be uniformly modified or may comprise a mix of modifications and/or modified and unmodified nucleosides.

### Target Nucleic Acids, Target Regions and Nucleotide Sequences

[0384] Nucleotide sequences that encode growth hormone receptor (GHR) targetable with the compounds provided herein include, without limitation, the following: GENBANK Accession No. NM_000163.4 (incorporated herein as SEQ ID NO: 1), GENBANK Accession No. NT_006576.16 truncated from nucleotides 42411001 to 42714000 (incorporated herein as SEQ ID NO: 2), GENBANK Accession No X06562.1 (incorporated herein as SEQ ID NO: 3), GENBANK Accession No. DR006395.1 (incorporated herein as SEQ ID NO: 4), GENBANK Accession No. DB052048.1 (incorporated herein as SEQ ID NO: 5), GENBANK Accession No. AF230800.1 (incorporated herein as SEQ ID NO: 6), the complement of GENBANK Accession No. AA398260.1 (incorporated herein as SEQ ID NO: 7), GENBANK Accession No. BC136496.1 (incorporated herein as SEQ ID NO: 8), GENBANK Accession No. NM_001242399.2 (incorporated herein as SEQ ID NO: 9), GENBANK Accession No. NM_001242400.2 (incorporated herein as SEQ ID NO: 10), GENBANK Accession No. NM_001242401.3 (incorporated herein as SEQ ID NO: 11), GENBANK Accession No. NM_001242402.2 (incorporated herein as SEQ ID NO: 12), GENBANK Accession No. NM_001242403.2 (incorporated herein as SEQ ID NO: 13), GENBANK Accession No. NM_001242404.2 (incorporated herein as SEQ ID NO: 14), GENBANK Accession No. NM_001242405.2 (incorporated herein as SEQ ID NO: 15), GENBANK Accession No. NM_001242406.2 (incorporated herein as SEQ ID NO: 16), GENBANK Accession No. NM_001242460.1 (incorporated herein as SEQ ID NO: 17), GENBANK Accession NM_001242461.1 (incorporated herein as SEQ ID NO: 18), GENBANK Accession No. NM_001242462.1 (incorporated herein as SEQ ID NO: 19), or GENBANK Accession No NW_001120958.1 truncated from nucleotides 4410000 to U.S. Pat. No. 4,720,000 (incorporated herein as SEQ ID NO: 2332).

### Hybridization

[0385] In some embodiments, hybridization occurs between an antisense compound disclosed herein and a GHR nucleic acid. The most common mechanism of hybridization involves hydrogen bonding (e.g., Watson-Crick, Hoogsteen or reversed Hoogsteen hydrogen bonding) between complementary nucleobases of the nucleic acid molecules.

[0386] Hybridization can occur under varying conditions. Stringent conditions are sequence-dependent and are determined by the nature and composition of the nucleic acid molecules to be hybridized.

[0387] Methods of determining whether a sequence is specifically hybridizable to a target nucleic acid are well known in the art. In certain embodiments, the antisense compounds provided herein are specifically hybridizable with a GHR nucleic acid.

### Complementarity

[0388] An antisense compound and a target nucleic acid are complementary to each other when a sufficient number of nucleobases of the antisense compound can hydrogen bond with the corresponding nucleobases of the target nucleic acid, such that a desired effect will occur (e.g., antisense inhibition of a target nucleic acid, such as a GHR nucleic acid).

[0389] Non-complementary nucleobases between an antisense compound and a GHR nucleic acid may be tolerated provided that the antisense compound remains able to specifically hybridize to a target nucleic acid. Moreover, an antisense compound may hybridize over one or more segments of a GHR nucleic acid such that intervening or adjacent segments are not involved in the hybridization event (e.g., a loop structure, mismatch or hairpin structure).

[0390] In certain embodiments, the antisense compounds provided herein, or a specified portion thereof, are, or are at least, 70%, 80%, 85%, 86%, 87%, 88%, 89%, 90%, 91%, 92%, 93%, 94%, 95%, 96%, 97%, 98%, 99%, or 100% complementary to a GHR nucleic acid, a target region, target segment, or specified portion thereof. Percent complementarity of an antisense compound with a target nucleic acid can be determined using routine methods.

[0391] For example, an antisense compound in which 18 of 20 nucleobases of the antisense compound are complementary to a target region, and would therefore specifically hybridize, would represent 90 percent complementarity. In this example, the remaining noncomplementary nucleobases may be clustered or interspersed with complementary nucleobases and need not be contiguous to each other or to complementary nucleobases. As such, an antisense compound which is 18 nucleobases in length having four noncomplementary nucleobases which are flanked by two regions of complete complementarity with the target nucleic acid would have 77.8% overall complementarity with the target nucleic acid and would thus fall within the scope of the present invention. Percent complementarity of an antisense compound with a region of a target nucleic acid can be determined routinely using BLAST programs (basic local alignment search tools) and PowerBLAST programs known in the art (Altschul et al., J. Mol. Biol., 1990, 215, 403 410; Zhang and Madden, Genome Res., 1997, 7, 649 656). Percent homology, sequence identity or complementarity, can be determined by, for example, the Gap program (Wisconsin Sequence Analysis Package, Version 8 for Unix, Genetics Computer Group, University Research Park, Madison Wis.), using default settings, which uses the algorithm of Smith and Waterman (Adv. Appl. Math., 1981, 2, 482 489).

[0392] In certain embodiments, the antisense compounds provided herein, or specified portions thereof, are fully complementary (i.e. 100% complementary) to a target nucleic acid, or specified portion thereof. For example, an antisense compound may be fully complementary to a GHR nucleic acid, or a target region, or a target segment or target sequence thereof. As used herein, “fully complementary” means each nucleobase of an antisense compound is capable of precise base pairing with the corresponding nucleobases of a target nucleic acid. For example, a 20 nucleobase antisense compound is fully complementary to a target sequence that is 400 nucleobases long, so long as there is a corresponding 20 nucleobase portion of the target nucleic acid that is fully complementary to the antisense compound. Fully complementary can also be used in reference to a specified portion of the first and/or the second nucleic acid. For example, a 20 nucleobase portion of a 30 nucleobase antisense compound can be “fully complementary” to a target sequence that is 400 nucleobases long. The 20 nucleobase portion of the 30 nucleobase oligonucleotide is fully complementary to the target sequence if the target sequence has a corresponding 20 nucleobase portion wherein each nucleobase is complementary to the 20 nucleobase portion of the antisense compound. At the same time, the entire 30 nucleobase antisense compound may or may not be fully complementary to the target sequence, depending on whether the remaining 10 nucleobases of the antisense compound are also complementary to the target sequence.

[0393] The location of a non-complementary nucleobase may be at the 5′ end or 3′ end of the antisense compound. Alternatively, the non-complementary nucleobase or nucleobases may be at an internal position of the antisense compound. When two or more non-complementary nucleobases are present, they may be contiguous (i.e. linked) or non-contiguous. In one embodiment, a non-complementary nucleobase is located in the wing segment of a gapmer antisense oligonucleotide.

[0394] In certain embodiments, antisense compounds that are, or are up to 11, 12, 13, 14, 15, 16, 17, 18, 19, or 20 nucleobases in length comprise no more than 4, no more than 3, no more than 2, or no more than 1 non-complementary nucleobase(s) relative to a target nucleic acid, such as a GHR nucleic acid, or specified portion thereof.

[0395] In certain embodiments, antisense compounds that are, or are up to 11, 12, 13, 14, 15, 16, 17, 18, 19, 20, 21, 22, 23, 24, 25, 26, 27, 28, 29, or 30 nucleobases in length comprise no more than 6, no more than 5, no more than 4, no more than 3, no more than 2, or no more than 1 non-complementary nucleobase(s) relative to a target nucleic acid, such as a GHR nucleic acid, or specified portion thereof.

[0396] The antisense compounds provided also include those which are complementary to a portion of a target nucleic acid. As used herein, “portion” refers to a defined number of contiguous (i.e. linked) nucleobases within a region or segment of a target nucleic acid. A “portion” can also refer to a defined number of contiguous nucleobases of an antisense compound. In certain embodiments, the antisense compounds, are complementary to at least an 8 nucleobase portion of a target segment. In certain embodiments, the antisense compounds are complementary to at least a 9 nucleobase portion of a target segment. In certain embodiments, the antisense compounds are complementary to at least a 10 nucleobase portion of a target segment. In certain embodiments, the antisense compounds are complementary to at least an 11 nucleobase portion of a target segment. In certain embodiments, the antisense compounds are complementary to at least a 12 nucleobase portion of a target segment. In certain embodiments, the antisense compounds are complementary to at least a 13 nucleobase portion of a target segment. In certain embodiments, the antisense compounds are complementary to at least a 14 nucleobase portion of a target segment. In certain embodiments, the antisense compounds are complementary to at least a 15 nucleobase portion of a target segment. Also contemplated are antisense compounds that are complementary to at least a 9, 10, 11, 12, 13, 14, 15, 16, 17, 18, 19, 20, or more nucleobase portion of a target segment, or a range defined by any two of these values.

### Identity

[0397] The antisense compounds provided herein may also have a defined percent identity to a particular nucleotide sequence, SEQ ID NO, or compound represented by a specific Isis number, or portion thereof. As used herein, an antisense compound is identical to the sequence disclosed herein if it has the same nucleobase pairing ability. For example, a RNA which contains uracil in place of thymidine in a disclosed DNA sequence would be considered identical to the DNA sequence since both uracil and thymidine pair with adenine. Shortened and lengthened versions of the antisense compounds described herein as well as compounds having non-identical bases relative to the antisense compounds provided herein also are contemplated. The non-identical bases may be adjacent to each other or dispersed throughout the antisense compound. Percent identity of an antisense compound is calculated according to the number of bases that have identical base pairing relative to the sequence to which it is being compared.

[0398] In certain embodiments, the antisense compounds, or portions thereof, are at least 70%, 75%, 80%, 85%, 90%, 95%, 96%, 97%, 98%, 99% or 100% identical to one or more of the antisense compounds or SEQ ID NOs, or a portion thereof, disclosed herein.

[0399] In certain embodiments, a portion of the antisense compound is compared to an equal length portion of the target nucleic acid. In certain embodiments, an 8, 9, 10, 11, 12, 13, 14, 15, 16, 17, 18, 19, 20, 21, 22, 23, 24, or 25 nucleobase portion is compared to an equal length portion of the target nucleic acid.

[0400] In certain embodiments, a portion of the antisense oligonucleotide is compared to an equal length portion of the target nucleic acid. In certain embodiments, an 8, 9, 10, 11, 12, 13, 14, 15, 16, 17, 18, 19, 20, 21, 22, 23, 24, or 25 nucleobase portion is compared to an equal length portion of the target nucleic acid.

### Modifications

[0401] A nucleoside is a base-sugar combination. The nucleobase (also known as base) portion of the nucleoside is normally a heterocyclic base moiety. Nucleotides are nucleosides that further include a phosphate group covalently linked to the sugar portion of the nucleoside. For those nucleosides that include a pentofuranosyl sugar, the phosphate group can be linked to the 2′, 3′ or 5′ hydroxyl moiety of the sugar. Oligonucleotides are formed through the covalent linkage of adjacent nucleosides to one another, to form a linear polymeric oligonucleotide. Within the oligonucleotide structure, the phosphate groups are commonly referred to as forming the internucleoside linkages of the oligonucleotide.

[0402] Modifications to antisense compounds encompass substitutions or changes to internucleoside linkages, sugar moieties, or nucleobases. Modified antisense compounds are often preferred over native forms because of desirable properties such as, for example, enhanced cellular uptake, enhanced affinity for nucleic acid target, increased stability in the presence of nucleases, or increased inhibitory activity.

[0403] Chemically modified nucleosides may also be employed to increase the binding affinity of a shortened or truncated antisense oligonucleotide for its target nucleic acid. Consequently, comparable results can often be obtained with shorter antisense compounds that have such chemically modified nucleosides.

### Modified Internucleoside Linkages

[0404] The naturally occurring internucleoside linkage of RNA and DNA is a 3′ to 5′ phosphodiester linkage. Antisense compounds having one or more modified, i.e. non-naturally occurring, internucleoside linkages are often selected over antisense compounds having naturally occurring internucleoside linkages because of desirable properties such as, for example, enhanced cellular uptake, enhanced affinity for target nucleic acids, and increased stability in the presence of nucleases.

[0405] Oligonucleotides having modified internucleoside linkages include internucleoside linkages that retain a phosphorus atom as well as internucleoside linkages that do not have a phosphorus atom. Representative phosphorus containing internucleoside linkages include, but are not limited to, phosphodiesters, phosphotriesters, methylphosphonates, phosphoramidate, and phosphorothioates. Methods of preparation of phosphorous-containing and non-phosphorous-containing linkages are well known.

[0406] In certain embodiments, antisense compounds targeted to a GHR nucleic acid comprise one or more modified internucleoside linkages. In certain embodiments, the modified internucleoside linkages are phosphorothioate linkages. In certain embodiments, each internucleoside linkage of an antisense compound is a phosphorothioate internucleoside linkage.

[0407] In certain embodiments, oligonucleotides comprise modified internucleoside linkages arranged along the oligonucleotide or region thereof in a defined pattern or modified internucleoside linkage motif. In certain embodiments, internucleoside linkages are arranged in a gapped motif. In such embodiments, the internucleoside linkages in each of two wing regions are different from the internucleoside linkages in the gap region. In certain embodiments the internucleoside linkages in the wings are phosphodiester and the internucleoside linkages in the gap are phosphorothioate. The nucleoside motif is independently selected, so such oligonucleotides having a gapped internucleoside linkage motif may or may not have a gapped nucleoside motif and if it does have a gapped nucleoside motif, the wing and gap lengths may or may not be the same.

[0408] In certain embodiments, oligonucleotides comprise a region having an alternating internucleoside linkage motif. In certain embodiments, oligonucleotides of the present invention comprise a region of uniformly modified internucleoside linkages. In certain such embodiments, the oligonucleotide comprises a region that is uniformly linked by phosphorothioate internucleoside linkages. In certain embodiments, the oligonucleotide is uniformly linked by phosphorothioate. In certain embodiments, each internucleoside linkage of the oligonucleotide is selected from phosphodiester and phosphorothioate. In certain embodiments, each internucleoside linkage of the oligonucleotide is selected from phosphodiester and phosphorothioate and at least one internucleoside linkage is phosphorothioate.

[0409] In certain embodiments, the oligonucleotide comprises at least 6 phosphorothioate internucleoside linkages. In certain embodiments, the oligonucleotide comprises at least 8 phosphorothioate internucleoside linkages. In certain embodiments, the oligonucleotide comprises at least 10 phosphorothioate internucleoside linkages. In certain embodiments, the oligonucleotide comprises at least one block of at least 6 consecutive phosphorothioate internucleoside linkages. In certain embodiments, the oligonucleotide comprises at least one block of at least 8 consecutive phosphorothioate internucleoside linkages. In certain embodiments, the oligonucleotide comprises at least one block of at least 10 consecutive phosphorothioate internucleoside linkages. In certain embodiments, the oligonucleotide comprises at least block of at least one 12 consecutive phosphorothioate internucleoside linkages. In certain such embodiments, at least one such block is located at the 3′ end of the oligonucleotide. In certain such embodiments, at least one such block is located within 3 nucleosides of the 3′ end of the oligonucleotide.

[0410] In certain embodiments, oligonucleotides comprise one or more methylphosponate linkages. In certain embodiments, oligonucleotides having a gapmer nucleoside motif comprise a linkage motif comprising all phosphorothioate linkages except for one or two methylphosponate linkages. In certain embodiments, one methylphosponate linkage is in the central gap of an oligonucleotide having a gapmer nucleoside motif.

[0411] In certain embodiments, it is desirable to arrange the number of phosphorothioate internucleoside linkages and phosphodiester internucleoside linkages to maintain nuclease resistance. In certain embodiments, it is desirable to arrange the number and position of phosphorothioate internucleoside linkages and the number and position of phosphodiester internucleoside linkages to maintain nuclease resistance. In certain embodiments, the number of phosphorothioate internucleoside linkages may be decreased and the number of phosphodiester internucleoside linkages may be increased. In certain embodiments, the number of phosphorothioate internucleoside linkages may be decreased and the number of phosphodiester internucleoside linkages may be increased while still maintaining nuclease resistance. In certain embodiments it is desirable to decrease the number of phosphorothioate internucleoside linkages while retaining nuclease resistance. In certain embodiments it is desirable to increase the number of phosphodiester internucleoside linkages while retaining nuclease resistance.

### Modified Sugar Moieties

[0412] Antisense compounds can optionally contain one or more nucleosides wherein the sugar group has been modified. Such sugar modified nucleosides may impart enhanced nuclease stability, increased binding affinity, or some other beneficial biological property to the antisense compounds. In certain embodiments, nucleosides comprise chemically modified ribofuranose ring moieties. Examples of chemically modified ribofuranose rings include without limitation, addition of substitutent groups (including 5′ and 2′ substituent groups, bridging of non-geminal ring atoms to form bicyclic nucleic acids (BNA), replacement of the ribosyl ring oxygen atom with S, N(R), or C(R₁)(R₂) (R, R₁ and R₂ are each independently H, C₁-C₁₂ alkyl or a protecting group) and combinations thereof. Examples of chemically modified sugars include 2′-F-5′-methyl substituted nucleoside (see PCT International Application WO 2008/101157 Published on Aug. 21, 2008 for other disclosed 5′,2′-bis substituted nucleosides) or replacement of the ribosyl ring oxygen atom with S with further substitution at the 2′-position (see published U.S. Patent Application US2005-0130923, published on Jun. 16, 2005) or alternatively 5′-substitution of a BNA (see PCT International Application WO 2007/134181 Published on Nov. 22, 2007 wherein LNA is substituted with for example a 5′-methyl or a 5′-vinyl group).

[0413] Examples of nucleosides having modified sugar moieties include without limitation nucleosides comprising 5′-vinyl, 5′-methyl (R or S), 4′-S, 2′-F, 2′-OCH₃, 2′-OCH₂CH₃, 2′-OCH₂CH₂F and 2′-O(CH₂)₂OCH₃ substituent groups. The substituent at the 2′ position can also be selected from allyl, amino, azido, thio, O-allyl, O—C₁-C₁₀ alkyl, OCF₃, OCH₂F, O(CH₂)₂SCH₃, O(CH₂)₂—O—N(Rₘ)(Rₙ), O—CH₂—C(═O)—N(Rₘ)(Rₙ), and O—CH₂—C(═O)—N(R)—(CH₂)₂—N(Rₘ)(Rₙ), where each Rₗ, Rₘ and Rₙ is, independently, H or substituted or unsubstituted C₁-C₁₀ alkyl.

[0414] As used herein, “bicyclic nucleosides” refer to modified nucleosides comprising a bicyclic sugar moiety. Examples of bicyclic nucleosides include without limitation nucleosides comprising a bridge between the 4′ and the 2′ ribosyl ring atoms. In certain embodiments, antisense compounds provided herein include one or more bicyclic nucleosides comprising a 4′ to 2′ bridge. Examples of such 4′ to 2′ bridged bicyclic nucleosides, include but are not limited to one of the formulae: 4′-(CH₂)—O-2′ (LNA); 4′-(CH₂)—S-2; 4′-(CH₂)₂—O-2′ (ENA); 4′-CH(CH₃)—O-2′ (also referred to as constrained ethyl or cEt) and 4′-CH(CH₂OCH₃)-0-2′ (and analogs thereof see U.S. Pat. No. 7,399,845, issued on Jul. 15, 2008); 4′-C(CH₃)(CH₃)—O-2′ (and analogs thereof see published International Application WO/2009/006478, published Jan. 8, 2009); 4′-CH₂—N(OCH₃)-2′ (and analogs thereof see published International Application WO/2008/150729, published Dec. 11, 2008); 4′-CH₂—O—N(CH₃)-2′ (see published U.S. Patent Application US2004-0171570, published Sep. 2, 2004); 4′-CH₂—N(R)—O-2′, wherein R is H, C₁-C₁₂ alkyl, or a protecting group (see

[0415] U.S. Pat. No. 7,427,672, issued on Sep. 23, 2008); 4′-CH₂—C(H)(CH₃)-2′ (see Zhou et al., J. Org. Chem., 2009, 74, 118-134); and 4′-CH₂—C(═CH₂)-2′ (and analogs thereof see published International Application WO 2008/154401, published on Dec. 8, 2008).

[0416] Further reports related to bicyclic nucleosides can also be found in published literature (see for example: Singh et al., Chem. Commun., 1998, 4, 455-456; Koshkin et al., Tetrahedron, 1998, 54, 3607-3630; Wahlestedt et al., Proc. Natl. Acad. Sci. U.S.A, 2000, 97, 5633-5638; Kumar et al., Bioorg. Med. Chem. Lett., 1998, 8, 2219-2222; Singh et al., J. Org. Chem., 1998, 63, 10035-10039; Srivastava et al., J. Am. Chem. Soc., 2007, 129(26) 8362-8379; Elayadi et al., Curr. Opinion Invest. Drugs, 2001, 2, 558-561; Braasch et al., Chem. Biol., 2001, 8, 1-7; and Orum et al., Curr. Opinion Mol. Ther., 2001, 3, 239-243; U.S. Pat. Nos. 6,268,490; 6,525,191; 6,670,461; 6,770,748; 6,794,499; 7,034,133; 7,053,207; 7,399,845; 7,547,684; and 7,696,345; U.S. Patent Publication No. US2008-0039618; US2009-0012281; U.S. Patent Serial Nos. 61/026,995 and 61/097,787; Published PCT International applications WO 1999/014226; WO 2004/106356; WO 2005/021570; WO 2007/134181; WO 2008/150729; WO 2008/154401; WO 2009/006478; WO 2010/036698; WO 2011/017521; WO 2009/067647; WO 20009/100320. Each of the foregoing bicyclic nucleosides can be prepared having one or more stereochemical sugar configurations including for example α-L-ribofuranose and β-D-ribofuranose (see PCT international application PCT/DK98/00393, published on Mar. 25, 1999 as WO 99/14226).

[0417] In certain embodiments, bicyclic sugar moieties of BNA nucleosides include, but are not limited to, compounds having at least one bridge between the 4′ and the 2′ position of the pentofuranosyl sugar moiety wherein such bridges independently comprises 1 or from 2 to 4 linked groups independently selected from —[C(Rₐ)(R_{b})]ₙ—, —C(Rₐ)═C(R_{b})—, —C(Rₐ)═N—, —C(═O)—, —C(═NRₐ)—, —C(═S)—, —O—, —Si(Rₐ)₂—, —S(═O)ₓ—, and —N(Rₐ)—;
[0418] wherein:
[0419] x is 0, 1, or 2;
[0420] n is 1, 2, 3, or 4;
[0421] each Rₐ and R_{b} is, independently, H, a protecting group, hydroxyl, C₁-C₁₂ alkyl, substituted C₁-C₁₂ alkyl, C₂-C₁₂ alkenyl, substituted C₂-C₁₂ alkenyl, C₂-C₁₂ alkynyl, substituted C₂-C₁₂ alkynyl, C₅-C₂₀ aryl, substituted C₅-C₂₀ aryl, heterocycle radical, substituted heterocycle radical, heteroaryl, substituted heteroaryl, C₅-C₇ alicyclic radical, substituted C₅-C₇ alicyclic radical, halogen, OJ₁, NJ₁J₂, SJ₁, N₃, COOJ₁, acyl (C(═O)—H), substituted acyl, CN, sulfonyl (S(═O)₂-J₁), or sulfoxyl (S(═O)-J₁); and
[0422] each J₁ and J₂ is, independently, H, C₁-C₁₂ alkyl, substituted C₁-C₁₂ alkyl, C₂-C₁₂ alkenyl, substituted C₂-C₁₂ alkenyl, C₂-C₁₂ alkynyl, substituted C₂-C₁₂ alkynyl, C₅-C₂₀ aryl, substituted C₅-C₂₀ aryl, acyl (C(═O)—H), substituted acyl, a heterocycle radical, a substituted heterocycle radical, C₁-C₁₂ aminoalkyl, substituted C₁-C₁₂ aminoalkyl or a protecting group.

[0423] In certain embodiments, the bridge of a bicyclic sugar moiety is —[C(Rₐ)(R_{b})]ₙ—, —[C(Rₐ)(R_{b})]ₙ—O—, —C(RₐR_{b})—N(R)—O— or —C(RₐR_{b})—O—N(R)—. In certain embodiments, the bridge is 4′-CH₂-2′,4′-(CH₂)₂-2′,4′-(CH₂)₃-2′,4′-CH₂—O-2′,4′-(CH₂)₂—O-2′,4′-CH₂—O—N(R)-2′ and 4′-CH₂—N(R)—O-2′- wherein each R is, independently, H, a protecting group or C₁-C₁₂ alkyl.

[0424] In certain embodiments, bicyclic nucleosides are further defined by isomeric configuration. For example, a nucleoside comprising a 4′-2′ methylene-oxy bridge, may be in the α-L configuration or in the β-D configuration. Previously, α-L-methyleneoxy (4′-CH₂—O-2′) BNA's have been incorporated into antisense oligonucleotides that showed antisense activity (Frieden et al., Nucleic Acids Research, 2003, 21, 6365-6372).

[0425] In certain embodiments, bicyclic nucleosides include, but are not limited to, (A) α-L-methyleneoxy (4′-CH₂—O-2′) BNA, (B) β-D-methyleneoxy (4′-CH₂—O-2′) BNA, (C) ethyleneoxy (4′-(CH₂)₂—O-2′) BNA, (D) aminooxy (4′-CH₂—O—N(R)-2′) BNA, (E) oxyamino (4′-CH₂—N(R)—O-2′) BNA, and (F) methyl(methyleneoxy) (4′-CH(CH₃)—O-2′) BNA, (G) methylene-thio (4′-CH₂—S-2′) BNA, (H) methylene-amino (4′-CH₂—N(R)-2′) BNA, (I) methyl carbocyclic (4′-CH₂—CH(CH₃)-2′) BNA, (J) propylene carbocyclic (4′-(CH₂)₃-2′) BNA and (K) vinyl BNA as depicted below:

[chemical structure]

[chemical structure]

[0426] wherein Bx is the base moiety and R is independently H, a protecting group, C₁-C₁₂ alkyl or C₁-C₁₂ alkoxy.

[0427] In certain embodiments, bicyclic nucleosides are provided having Formula I:

[chemical structure]

wherein:
[0428] Bx is a heterocyclic base moiety;
[0429] -Qₐ-Q_{b}-Q_{c}- is —CH₂—N(R_{c})—CH₂—, —C(═O)—N(Rₑ)—CH₂—, —CH₂—O—N(R_{c})—, —CH₂—N(R_{c})—O— or —N(R_{c})—O—CH₂;
[0430] R_{c} is C₁-C₁₂ alkyl or an amino protecting group; and
[0431] Tₐ and T_{b} are each, independently H, a hydroxyl protecting group, a conjugate group, a reactive phosphorus group, a phosphorus moiety or a covalent attachment to a support medium.

[0432] In certain embodiments, bicyclic nucleosides are provided having Formula II:

[chemical structure]

wherein:
[0433] Bx is a heterocyclic base moiety;
[0434] Tₐ and T_{b} are each, independently H, a hydroxyl protecting group, a conjugate group, a reactive phosphorus group, a phosphorus moiety or a covalent attachment to a support medium;
[0435] Zₐ is C₁-C₆ alkyl, C₂-C₆ alkenyl, C₂-C₆ alkynyl, substituted C₁-C₆ alkyl, substituted C₂-C₆ alkenyl, substituted C₂-C₆ alkynyl, acyl, substituted acyl, substituted amide, thiol or substituted thio.

[0436] In one embodiment, each of the substituted groups is, independently, mono or poly substituted with substituent groups independently selected from halogen, oxo, hydroxyl, OJ_{c}, NJ_{c}J_{d}, SJ_{c}, N₃, OC(═X)Jₑ, and NJₑC(═X)NJ_{c}J_{d}, wherein each J_{c}, J_{d} and Jₑ is, independently, H, C₁-C₆ alkyl, or substituted C₁-C₆ alkyl and X is O or NJ_{c}.

[0437] In certain embodiments, bicyclic nucleosides are provided having Formula III:

[chemical structure]

wherein:
[0438] Bx is a heterocyclic base moiety;
[0439] Tₐ and T_{b} are each, independently H, a hydroxyl protecting group, a conjugate group, a reactive phosphorus group, a phosphorus moiety or a covalent attachment to a support medium;
[0440] Z_{b} is C₁-C₆ alkyl, C₂-C₆ alkenyl, C₂-C₆ alkynyl, substituted C₁-C₆ alkyl, substituted C₂-C₆ alkenyl, substituted C₂-C₆ alkynyl or substituted acyl (C(═O)—).

[0441] In certain embodiments, bicyclic nucleosides are provided having Formula IV:

[chemical structure]

wherein:
[0442] Bx is a heterocyclic base moiety;
[0443] Tₐ and T_{b} are each, independently H, a hydroxyl protecting group, a conjugate group, a reactive phosphorus group, a phosphorus moiety or a covalent attachment to a support medium;
[0444] R_{d} is C₁-C₆ alkyl, substituted C₁-C₆ alkyl, C₂-C₆ alkenyl, substituted C₂-C₆ alkenyl, C₂-C₆ alkynyl or substituted C₂-C₆ alkynyl;
[0445] each qₐ, q_{b}, q_{c} and q_{d} is, independently, H, halogen, C₁-C₆ alkyl, substituted C₁-C₆ alkyl, C₂-C₆ alkenyl, substituted C₂-C₆ alkenyl, C₂-C₆ alkynyl or substituted C₂-C₆ alkynyl, C₁-C₆ alkoxyl, substituted C₁-C₆ alkoxyl, acyl, substituted acyl, C₁-C₆ aminoalkyl or substituted C₁-C₆ aminoalkyl;

[0446] In certain embodiments, bicyclic nucleosides are provided having Formula V:

[chemical structure]

wherein:
[0447] Bx is a heterocyclic base moiety;
[0448] Tₐ and T_{b} are each, independently H, a hydroxyl protecting group, a conjugate group, a reactive phosphorus group, a phosphorus moiety or a covalent attachment to a support medium;
[0449] qₐ, q_{b}, q_{c} and q_{f} are each, independently, hydrogen, halogen, C₁-C₁₂ alkyl, substituted C₁-C₁₂ alkyl, C₂-C₁₂ alkenyl, substituted C₂-C₁₂ alkenyl, C₂-C₁₂ alkynyl, substituted C₂-C₁₂ alkynyl, C₁-C₁₂ alkoxy, substituted C₁-C₁₂ alkoxy, OJⱼ, SJⱼ, SOJⱼ, SO₂Jⱼ, NJⱼJₖ, N₃, CN, C(═O)OJⱼ, C(═O)NJⱼJₖ, C(═O)Jⱼ, O—C(═O)NJⱼJₖ, N(H)C(═NH)NJⱼJₖ, N(H)C(═O)NJⱼJₖ or N(H)C(═S)NJⱼJₖ;
[0450] or qₑ and q_{f} together are ═C(q_{g})(qₕ);
[0451] q_{g} and qₕ are each, independently, H, halogen, C₁-C₁₂ alkyl or substituted C₁-C₁₂ alkyl.

[0452] The synthesis and preparation of the methyleneoxy (4′-CH₂—O-2′) BNA monomers adenine, cytosine, guanine, 5-methyl-cytosine, thymine and uracil, along with their oligomerization, and nucleic acid recognition properties have been described (Koshkin et al., Tetrahedron, 1998, 54, 3607-3630). BNAs and preparation thereof are also described in WO 98/39352 and WO 99/14226.

[0453] Analogs of methyleneoxy (4′-CH₂—O-2′) BNA and 2′-thio-BNAs, have also been prepared (Kumar et al., Bioorg. Med. Chem. Lett., 1998, 8, 2219-2222). Preparation of locked nucleoside analogs comprising oligodeoxyribonucleotide duplexes as substrates for nucleic acid polymerases has also been described (Wengel et al., WO 99/14226). Furthermore, synthesis of 2′-amino-BNA, a novel comformationally restricted high-affinity oligonucleotide analog has been described in the art (Singh et al., J Org. Chem., 1998, 63, 10035-10039). In addition, 2′-amino- and 2′-methylamino-BNA's have been prepared and the thermal stability of their duplexes with complementary RNA and DNA strands has been previously reported.

[0454] In certain embodiments, bicyclic nucleosides are provided having Formula VI:

[chemical structure]

wherein:
[0455] Bx is a heterocyclic base moiety;
[0456] Tₐ and T_{b} are each, independently H, a hydroxyl protecting group, a conjugate group, a reactive phosphorus group, a phosphorus moiety or a covalent attachment to a support medium;
[0457] each qᵢ, qⱼ, qₖ and qₗ is, independently, H, halogen, C₁-C₁₂ alkyl, substituted C₁-C₁₂ alkyl, C₂-C₁₂ alkenyl, substituted C₂-C₁₂ alkenyl, C₂-C₁₂ alkynyl, substituted C₂-C₁₂ alkynyl, C₁-C₁₂ alkoxyl, substituted C₁₂ alkoxyl, OJⱼ, SJⱼ, SOJⱼ, SO₂Jⱼ, NJⱼJₖ, N₃, CN, C(═O)OJⱼ, C(═O)NJⱼJₖ, C(═O)Jⱼ, O—C(═O)NJⱼJₖ, N(H)C(═NH)NJⱼJₖ, N(H)C(═O)NJⱼJₖ or N(H)C(═S)NJⱼJₖ; and

[0458] qᵢ and qⱼ or qₗ and qₖ together are ═C(q_{g})(qₕ), wherein q_{g} and qₕ are each, independently, H, halogen, C₁-C₁₂ alkyl or substituted C₁-C₁₂ alkyl.

[0459] One carbocyclic bicyclic nucleoside having a 4′-(CH₂)₃-2′ bridge and the alkenyl analog bridge 4′-CH═CH—CH₂-2′ have been described (Freier et al., Nucleic Acids Research, 1997, 25(22), 4429-4443 and Albaek et al., J. Org. Chem., 2006, 71, 7731-7740). The synthesis and preparation of carbocyclic bicyclic nucleosides along with their oligomerization and biochemical studies have also been described (Srivastava et al., J. Am. Chem. Soc., 2007, 129(26), 8362-8379).

[0460] As used herein, “4′-2′ bicyclic nucleoside” or “4′ to 2′ bicyclic nucleoside” refers to a bicyclic nucleoside comprising a furanose ring comprising a bridge connecting two carbon atoms of the furanose ring connects the 2′ carbon atom and the 4′ carbon atom of the sugar ring.

[0461] As used herein, “monocyclic nucleosides” refer to nucleosides comprising modified sugar moieties that are not bicyclic sugar moieties. In certain embodiments, the sugar moiety, or sugar moiety analogue, of a nucleoside may be modified or substituted at any position.

[0462] As used herein, “2′-modified sugar” means a furanosyl sugar modified at the 2′ position. In certain embodiments, such modifications include substituents selected from: a halide, including, but not limited to substituted and unsubstituted alkoxy, substituted and unsubstituted thioalkyl, substituted and unsubstituted amino alkyl, substituted and unsubstituted alkyl, substituted and unsubstituted allyl, and substituted and unsubstituted alkynyl. In certain embodiments, 2′ modifications are selected from substituents including, but not limited to: O[(CH₂)ₙO]ₘCH₃, O(CH₂)ₙNH₂, O(CH₂)ₙCH₃, O(CH₂)ₙF, O(CH₂)ₙONH₂, OCH₂C(═O)N(H)CH₃, and O(CH₂)ₙON[(CH₂)ₙCH₃]₂, where n and m are from 1 to about 10. Other 2′-substituent groups can also be selected from: C₁-C₁₂ alkyl, substituted alkyl, alkenyl, alkynyl, alkaryl, aralkyl, O-alkaryl or O-aralkyl, SH, SCH₃, OCN, Cl, Br, CN, F, CF₃, OCF₃, SOCH₃, SO₂CH₃, ONO₂, NO₂, N₃, NH₂, heterocycloalkyl, heterocycloalkaryl, aminoalkylamino, polyalkylamino, substituted silyl, an RNA cleaving group, a reporter group, an intercalator, a group for improving pharmacokinetic properties, or a group for improving the pharmacodynamic properties of an antisense compound, and other substituents having similar properties. In certain embodiments, modified nucleosides comprise a 2′-MOE side chain (Baker et al., J. Biol. Chem., 1997, 272, 11944-12000). Such 2′-MOE substitution have been described as having improved binding affinity compared to unmodified nucleosides and to other modified nucleosides, such as 2′-O-methyl, O-propyl, and O-aminopropyl. Oligonucleotides having the 2′-MOE substituent also have been shown to be antisense inhibitors of gene expression with promising features for in vivo use (Martin, Helv. Chim. Acta, 1995, 78, 486-504; Altmann et al., Chimia, 1996, 50, 168-176; Altmann et al., Biochem. Soc. Trans., 1996, 24, 630-637; and Altmann et al., Nucleosides Nucleotides, 1997, 16, 917-926).

[0463] As used herein, a “modified tetrahydropyran nucleoside” or “modified THP nucleoside” means a nucleoside having a six-membered tetrahydropyran “sugar” substituted in for the pentofuranosyl residue in normal nucleosides (a sugar surrogate). Modified THP nucleosides include, but are not limited to, what is referred to in the art as hexitol nucleic acid (HNA), anitol nucleic acid (ANA), manitol nucleic acid (MNA) (see Leumann, Bioorg. Med. Chem., 2002, 10, 841-854) or fluoro HNA (F-HNA) having a tetrahydropyran ring system as illustrated below:

[chemical structure]

[0464] In certain embodiments, sugar surrogates are selected having Formula VII:

[chemical structure]

wherein independently for each of said at least one tetrahydropyran nucleoside analog of Formula VII:
[0465] Bx is a heterocyclic base moiety;
[0466] Tₐ and T_{b} are each, independently, an internucleoside linking group linking the tetrahydropyran nucleoside analog to the antisense compound or one of Tₐ and T_{b} is an internucleoside linking group linking the tetrahydropyran nucleoside analog to the antisense compound and the other of Tₐ and T_{b} is H, a hydroxyl protecting group, a linked conjugate group or a 5′ or 3′-terminal group;
[0467] q₁, q₂, q₃, q₄, q₅, q₆ and q₇ are each independently, H, C₁-C₆ alkyl, substituted C₁-C₆ alkyl, C₂-C₆ alkenyl, substituted C₂-C₆ alkenyl, C₂-C₆ alkynyl or substituted C₂-C₆ alkynyl; and each of R₁ and R₂ is selected from hydrogen, hydroxyl, halogen, substituted or unsubstituted alkoxy, NJ₁J₂, SJ₁, N₃, OC(═X)J₁, OC(═X)NJ₁J₂, NJ₃C(═X)NJ₁J₂ and CN, wherein X is 0, S or NJ₁ and each J₁, J₂ and J₃ is, independently, H or C₁-C₆ alkyl.

[0468] In certain embodiments, the modified THP nucleosides of Formula VII are provided wherein q₁, q₂, q₃, q₄, q₅, q₆ and q₇ are each H. In certain embodiments, at least one of q₁, q₂, q₃, q₄, q₅, q₆ and q₇ is other than H. In certain embodiments, at least one of q₁, q₂, q₃, q₄, q₅, q₆ and q₇ is methyl. In certain embodiments, THP nucleosides of Formula VII are provided wherein one of R₁ and R₂ is fluoro. In certain embodiments, R₁ is fluoro and R₂ is H; R₁ is methoxy and R₂ is H, and R₁ is methoxyethoxy and R₂ is H.

[0469] In certain embodiments, sugar surrogates comprise rings having more than 5 atoms and more than one heteroatom. For example nucleosides comprising morpholino sugar moieties and their use in oligomeric compounds has been reported (see for example: Braasch et al., Biochemistry, 2002, 41, 4503-4510; and U.S. Pat. Nos. 5,698,685; 5,166,315; 5,185,444; and 5,034,506). As used here, the term “morpholino” means a sugar surrogate having the following formula:

[chemical structure]

In certain embodiments, morpholinos may be modified, for example by adding or altering various substituent groups from the above morpholino structure. Such sugar surrogates are referred to herein as “modified morpholinos.”

[0470] Combinations of modifications are also provided without limitation, such as 2′-F-5′-methyl substituted nucleosides (see PCT International Application WO 2008/101157 published on Aug. 21, 2008 for other disclosed 5′,2′-bis substituted nucleosides) and replacement of the ribosyl ring oxygen atom with S and further substitution at the 2′-position (see published U.S. Patent Application US2005-0130923, published on Jun. 16, 2005) or alternatively 5′-substitution of a bicyclic nucleic acid (see PCT International Application WO 2007/134181, published on Nov. 22, 2007 wherein a 4′-CH₂—O-2′ bicyclic nucleoside is further substituted at the 5′ position with a 5′-methyl or a 5′-vinyl group). The synthesis and preparation of carbocyclic bicyclic nucleosides along with their oligomerization and biochemical studies have also been described (see, e.g., Srivastava et al., J. Am. Chem. Soc. 2007, 129(26), 8362-8379).

[0471] In certain embodiments, antisense compounds comprise one or more modified cyclohexenyl nucleosides, which is a nucleoside having a six-membered cyclohexenyl in place of the pentofuranosyl residue in naturally occurring nucleosides. Modified cyclohexenyl nucleosides include, but are not limited to those described in the art (see for example commonly owned, published PCT Application WO 2010/036696, published on Apr. 10, 2010, Robeyns et al., J. Am. Chem. Soc., 2008, 130(6), 1979-1984; Horvath et al., Tetrahedron Letters, 2007, 48, 3621-3623; Nauwelaerts et al., J. Am. Chem. Soc., 2007, 129(30), 9340-9348; Gu et al., Nucleosides, Nucleotides & Nucleic Acids, 2005, 24(5-7), 993-998; Nauwelaerts et al., Nucleic Acids Research, 2005, 33(8), 2452-2463; Robeyns et al., Acta Crystallographica, Section F: Structural Biology and Crystallization Communications, 2005, F61(6), 585-586; Gu et al., Tetrahedron, 2004, 60(9), 2111-2123; Gu et al., Oligonucleotides, 2003, 13(6), 479-489; Wang et al., J. Org. Chem., 2003, 68, 4499-4505; Verbeure et al., Nucleic Acids Research, 2001, 29(24), 4941-4947; Wang et al., J. Org. Chem., 2001, 66, 8478-82; Wang et al., Nucleosides, Nucleotides & Nucleic Acids, 2001, 20(4-7), 785-788; Wang et al., J. Am. Chem., 2000, 122, 8595-8602; Published PCT application, WO 06/047842; and Published PCT Application WO 01/049687; the text of each is incorporated by reference herein, in their entirety). Certain modified cyclohexenyl nucleosides have Formula X.

[chemical structure]

[0472] wherein independently for each of said at least one cyclohexenyl nucleoside analog of Formula X:
[0473] Bx is a heterocyclic base moiety;
[0474] T₃ and T₄ are each, independently, an internucleoside linking group linking the cyclohexenyl nucleoside analog to an antisense compound or one of T₃ and T₄ is an internucleoside linking group linking the tetrahydropyran nucleoside analog to an antisense compound and the other of T₃ and T₄ is H, a hydroxyl protecting group, a linked conjugate group, or a 5′- or 3′-terminal group; and
[0475] q₁, q₂, q₃, q₄, q₅, q₆, q₇, q₈ and q₉ are each, independently, H, C₁-C₆ alkyl, substituted C₁-C₆ alkyl, C₂-C₆ alkenyl, substituted C₂-C₆ alkenyl, C₂-C₆ alkynyl, substituted C₂-C₆ alkynyl or other sugar substituent group.

[0476] As used herein, “2′-modified” or “2′-substituted” refers to a nucleoside comprising a sugar comprising a substituent at the 2′ position other than H or OH. 2′-modified nucleosides, include, but are not limited to, bicyclic nucleosides wherein the bridge connecting two carbon atoms of the sugar ring connects the 2′ carbon and another carbon of the sugar ring; and nucleosides with non-bridging 2 ‘substituents, such as allyl, amino, azido, thio, O-allyl, O—C₁-C₁₀ alkyl, —OCF₃, O—(CH₂)₂—O—CH₃, 2’-O(CH₂)₂SCH₃, O—(CH₂)₂—O—N(Rₘ)(Rₙ), or O—CH₂—C(═O)—N(Rₘ)(Rₙ), where each Rₘ and Rₙ is, independently, H or substituted or unsubstituted C₁-C₁₀ alkyl. 2′-modified nucleosides may further comprise other modifications, for example at other positions of the sugar and/or at the nucleobase.

[0477] As used herein, “2′-F” refers to a nucleoside comprising a sugar comprising a fluoro group at the 2′ position of the sugar ring.

[0478] As used herein, “2′-OMe” or “2′-OCH₃” or “2′-O-methyl” each refers to a nucleoside comprising a sugar comprising an —OCH₃ group at the 2′ position of the sugar ring.

[0479] As used herein, “MOE” or “2′-MOE” or “2′-OCH₂CH₂OCH₃” or “2′-O-methoxyethyl” each refers to a nucleoside comprising a sugar comprising a —OCH₂CH₂OCH₃ group at the 2′ position of the sugar ring.

[0480] As used herein, “oligonucleotide” refers to a compound comprising a plurality of linked nucleosides. In certain embodiments, one or more of the plurality of nucleosides is modified. In certain embodiments, an oligonucleotide comprises one or more ribonucleosides (RNA) and/or deoxyribonucleosides (DNA).

[0481] Many other bicyclo and tricyclo sugar surrogate ring systems are also known in the art that can be used to modify nucleosides for incorporation into antisense compounds (see for example review article: Leumann, Bioorg. Med. Chem., 2002, 10, 841-854). Such ring systems can undergo various additional substitutions to enhance activity.

[0482] Methods for the preparations of modified sugars are well known to those skilled in the art. Some representative U.S. patents that teach the preparation of such modified sugars include without limitation, U.S.: 4,981,957; 5,118,800; 5,319,080; 5,359,044; 5,393,878; 5,446,137; 5,466,786; 5,514,785; 5,519,134; 5,567,811; 5,576,427; 5,591,722; 5,597,909; 5,610,300; 5,627,053; 5,639,873; 5,646,265; 5,670,633; 5,700,920; 5,792,847 and 6,600,032 and International Application PCT/US2005/019219, filed Jun. 2, 2005 and published as WO 2005/121371 on Dec. 22, 2005, and each of which is herein incorporated by reference in its entirety.

[0483] In nucleotides having modified sugar moieties, the nucleobase moieties (natural, modified or a combination thereof) are maintained for hybridization with an appropriate nucleic acid target.

[0484] In certain embodiments, antisense compounds comprise one or more nucleosides having modified sugar moieties. In certain embodiments, the modified sugar moiety is 2′-MOE. In certain embodiments, the 2′-MOE modified nucleosides are arranged in a gapmer motif. In certain embodiments, the modified sugar moiety is a bicyclic nucleoside having a (4′-CH(CH₃)—O-2′) bridging group. In certain embodiments, the (4′-CH(CH₃)—O-2′) modified nucleosides are arranged throughout the wings of a gapmer motif.

### Modified Nucleobases

[0485] Nucleobase (or base) modifications or substitutions are structurally distinguishable from, yet functionally interchangeable with, naturally occurring or synthetic unmodified nucleobases. Both natural and modified nucleobases are capable of participating in hydrogen bonding. Such nucleobase modifications can impart nuclease stability, binding affinity or some other beneficial biological property to antisense compounds. Modified nucleobases include synthetic and natural nucleobases such as, for example, 5-methylcytosine (5-me-C). Certain nucleobase substitutions, including 5-methylcytosine substitutions, are particularly useful for increasing the binding affinity of an antisense compound for a target nucleic acid. For example, 5-methylcytosine substitutions have been shown to increase nucleic acid duplex stability by 0.6-1.2° C. (Sanghvi, Y. S., Crooke, S. T. and Lebleu, B., eds., Antisense Research and Applications, CRC Press, Boca Raton, 1993, pp. 276-278).

[0486] Additional modified nucleobases include 5-hydroxymethyl cytosine, xanthine, hypoxanthine, 2-aminoadenine, 6-methyl and other alkyl derivatives of adenine and guanine, 2-propyl and other alkyl derivatives of adenine and guanine, 2-thiouracil, 2-thiothymine and 2-thiocytosine, 5-halouracil and cytosine, 5-propynyl (—C≡C—CH3) uracil and cytosine and other alkynyl derivatives of pyrimidine bases, 6-azo uracil, cytosine and thymine, 5-uracil (pseudouracil), 4-thiouracil, 8-halo, 8-amino, 8-thiol, 8-thioalkyl, 8-hydroxyl and other 8-substituted adenines and guanines, 5-halo particularly 5-bromo, 5-trifluoromethyl and other 5-substituted uracils and cytosines, 7-methylguanine and 7-methyladenine, 2-F-adenine, 2-amino-adenine, 8-azaguanine and 8-azaadenine, 7-deazaguanine and 7-deazaadenine and 3-deazaguanine and 3-deazaadenine.

[0487] Heterocyclic base moieties can also include those in which the purine or pyrimidine base is replaced with other heterocycles, for example 7-deaza-adenine, 7-deazaguanosine, 2-aminopyridine and 2-pyridone. Nucleobases that are particularly useful for increasing the binding affinity of antisense compounds include 5-substituted pyrimidines, 6-azapyrimidines and N-2, N-6 and 0-6 substituted purines, including 2 aminopropyladenine, 5-propynyluracil and 5-propynylcytosine.

[0488] In certain embodiments, antisense compounds targeted to a GHR nucleic acid comprise one or more modified nucleobases. In certain embodiments, shortened or gap-widened antisense oligonucleotides targeted to a GHR nucleic acid comprise one or more modified nucleobases. In certain embodiments, the modified nucleobase is 5-methylcytosine. In certain embodiments, each cytosine is a 5-methylcytosine.

### Conjugated Antisense Compounds

[0489] In certain embodiments, the present disclosure provides conjugated antisense compounds. In certain embodiments, the present disclosure provides conjugated antisense compounds comprising an antisense oligonucleotide complementary to a nucleic acid transcript. In certain embodiments, the present disclosure provides methods comprising contacting a cell with a conjugated antisense compound comprising an antisense oligonucleotide complementary to a nucleic acid transcript. In certain embodiments, the present disclosure provides methods comprising contacting a cell with a conjugated antisense compound comprising an antisense oligonucleotide and reducing the amount or activity of a nucleic acid transcript in a cell.

[0490] The asialoglycoprotein receptor (ASGP-R) has been described previously. See e.g., Park et al., PNAS vol. 102, No. 47, pp 17125-17129 (2005). Such receptors are expressed on liver cells, particularly hepatocytes. Further, it has been shown that compounds comprising clusters of three N-acetylgalactosamine (GalNAc) ligands are capable of binding to the ASGP-R, resulting in uptake of the compound into the cell. See e.g., Khorev et al., Bioorganic and Medicinal Chemistry, 16, 9, pp 5216-5231 (May 2008). Accordingly, conjugates comprising such GalNAc clusters have been used to facilitate uptake of certain compounds into liver cells, specifically hepatocytes. For example it has been shown that certain GalNAc-containing conjugates increase activity of duplex siRNA compounds in liver cells in vivo. In such instances, the GalNAc-containing conjugate is typically attached to the sense strand of the siRNA duplex. Since the sense strand is discarded before the antisense strand ultimately hybridizes with the target nucleic acid, there is little concern that the conjugate will interfere with activity. Typically, the conjugate is attached to the 3′ end of the sense strand of the siRNA. See e.g., U.S. Pat. No. 8,106,022. Certain conjugate groups described herein are more active and/or easier to synthesize than conjugate groups previously described.

[0491] In certain embodiments of the present invention, conjugates are attached to single-stranded antisense compounds, including, but not limited to RNase H based antisense compounds and antisense compounds that alter splicing of a pre-mRNA target nucleic acid. In such embodiments, the conjugate should remain attached to the antisense compound long enough to provide benefit (improved uptake into cells) but then should either be cleaved, or otherwise not interfere with the subsequent steps necessary for activity, such as hybridization to a target nucleic acid and interaction with RNase H or enzymes associated with splicing or splice modulation. This balance of properties is more important in the setting of single-stranded antisense compounds than in siRNA compounds, where the conjugate may simply be attached to the sense strand. Disclosed herein are conjugated single-stranded antisense compounds having improved potency in liver cells in vivo compared with the same antisense compound lacking the conjugate. Given the required balance of properties for these compounds such improved potency is surprising.

[0492] In certain embodiments, conjugate groups herein comprise a cleavable moiety. As noted, without wishing to be bound by mechanism, it is logical that the conjugate should remain on the compound long enough to provide enhancement in uptake, but after that, it is desirable for some portion or, ideally, all of the conjugate to be cleaved, releasing the parent compound (e.g., antisense compound) in its most active form. In certain embodiments, the cleavable moiety is a cleavable nucleoside. Such embodiments take advantage of endogenous nucleases in the cell by attaching the rest of the conjugate (the cluster) to the antisense oligonucleotide through a nucleoside via one or more cleavable bonds, such as those of a phosphodiester linkage. In certain embodiments, the cluster is bound to the cleavable nucleoside through a phosphodiester linkage. In certain embodiments, the cleavable nucleoside is attached to the antisense oligonucleotide (antisense compound) by a phosphodiester linkage. In certain embodiments, the conjugate group may comprise two or three cleavable nucleosides. In such embodiments, such cleavable nucleosides are linked to one another, to the antisense compound and/or to the cluster via cleavable bonds (such as those of a phosphodiester linkage). Certain conjugates herein do not comprise a cleavable nucleoside and instead comprise a cleavable bond. It is shown that that sufficient cleavage of the conjugate from the oligonucleotide is provided by at least one bond that is vulnerable to cleavage in the cell (a cleavable bond).

[0493] In certain embodiments, conjugated antisense compounds are prodrugs. Such prodrugs are administered to an animal and are ultimately metabolized to a more active form. For example, conjugated antisense compounds are cleaved to remove all or part of the conjugate resulting in the active (or more active) form of the antisense compound lacking all or some of the conjugate.

[0494] In certain embodiments, conjugates are attached at the 5′ end of an oligonucleotide. Certain such 5′-conjugates are cleaved more efficiently than counterparts having a similar conjugate group attached at the 3′ end. In certain embodiments, improved activity may correlate with improved cleavage. In certain embodiments, oligonucleotides comprising a conjugate at the 5′ end have greater efficacy than oligonucleotides comprising a conjugate at the 3′ end (see, for example, Examples 56, 81, 83, and 84). Further, 5′-attachment allows simpler oligonucleotide synthesis. Typically, oligonucleotides are synthesized on a solid support in the 3′ to 5′ direction. To make a 3′-conjugated oligonucleotide, typically one attaches a pre-conjugated 3′ nucleoside to the solid support and then builds the oligonucleotide as usual. However, attaching that conjugated nucleoside to the solid support adds complication to the synthesis. Further, using that approach, the conjugate is then present throughout the synthesis of the oligonucleotide and can become degraded during subsequent steps or may limit the sorts of reactions and reagents that can be used. Using the structures and techniques described herein for 5′-conjugated oligonucleotides, one can synthesize the oligonucleotide using standard automated techniques and introduce the conjugate with the final (5′-most) nucleoside or after the oligonucleotide has been cleaved from the solid support.

[0495] In view of the art and the present disclosure, one of ordinary skill can easily make any of the conjugates and conjugated oligonucleotides herein. Moreover, synthesis of certain such conjugates and conjugated oligonucleotides disclosed herein is easier and/or requires few steps, and is therefore less expensive than that of conjugates previously disclosed, providing advantages in manufacturing. For example, the synthesis of certain conjugate groups consists of fewer synthetic steps, resulting in increased yield, relative to conjugate groups previously described. Conjugate groups such as GalNAc3-10 in Example 46 and GalNAc3-7 in Example 48 are much simpler than previously described conjugates such as those described in U.S. Pat. No. 8,106,022 or U.S. Pat. No. 7,262,177 that require assembly of more chemical intermediates. Accordingly, these and other conjugates described herein have advantages over previously described compounds for use with any oligonucleotide, including single-stranded oligonucleotides and either strand of double-stranded oligonucleotides (e.g., siRNA).

[0496] Similarly, disclosed herein are conjugate groups having only one or two GalNAc ligands. As shown, such conjugates groups improve activity of antisense compounds. Such compounds are much easier to prepare than conjugates comprising three GalNAc ligands. Conjugate groups comprising one or two GalNAc ligands may be attached to any antisense compounds, including single-stranded oligonucleotides and either strand of double-stranded oligonucleotides (e.g., siRNA).

[0497] In certain embodiments, the conjugates herein do not substantially alter certain measures of tolerability. For example, it is shown herein that conjugated antisense compounds are not more immunogenic than unconjugated parent compounds. Since potency is improved, embodiments in which tolerability remains the same (or indeed even if tolerability worsens only slightly compared to the gains in potency) have improved properties for therapy.

[0498] In certain embodiments, conjugation allows one to alter antisense compounds in ways that have less attractive consequences in the absence of conjugation. For example, in certain embodiments, replacing one or more phosphorothioate linkages of a fully phosphorothioate antisense compound with phosphodiester linkages results in improvement in some measures of tolerability. For example, in certain instances, such antisense compounds having one or more phosphodiester are less immunogenic than the same compound in which each linkage is a phosphorothioate. However, in certain instances, as shown in Example 26, that same replacement of one or more phosphorothioate linkages with phosphodiester linkages also results in reduced cellular uptake and/or loss in potency. In certain embodiments, conjugated antisense compounds described herein tolerate such change in linkages with little or no loss in uptake and potency when compared to the conjugated full-phosphorothioate counterpart. In fact, in certain embodiments, for example, in Examples 44, 57, 59, and 86, oligonucleotides comprising a conjugate and at least one phosphodiester internucleoside linkage actually exhibit increased potency in vivo even relative to a full phosphorothioate counterpart also comprising the same conjugate. Moreover, since conjugation results in substantial increases in uptake/potency a small loss in that substantial gain may be acceptable to achieve improved tolerability. Accordingly, in certain embodiments, conjugated antisense compounds comprise at least one phosphodiester linkage

[0499] In certain embodiments, conjugation of antisense compounds herein results in increased delivery, uptake and activity in hepatocytes. Thus, more compound is delivered to liver tissue. However, in certain embodiments, that increased delivery alone does not explain the entire increase in activity. In certain such embodiments, more compound enters hepatocytes. In certain embodiments, even that increased hepatocyte uptake does not explain the entire increase in activity. In such embodiments, productive uptake of the conjugated compound is increased. For example, as shown in Example 102, certain embodiments of GalNAc-containing conjugates increase enrichment of antisense oligonucleotides in hepatocytes versus non-parenchymal cells. This enrichment is beneficial for oligonucleotides that target genes that are expressed in hepatocytes.

[0500] In certain embodiments, conjugated antisense compounds herein result in reduced kidney exposure. For example, as shown in Example 20, the concentrations of antisense oligonucleotides comprising certain embodiments of GalNAc-containing conjugates are lower in the kidney than that of antisense oligonucleotides lacking a GalNAc-containing conjugate. This has several beneficial therapeutic implications. For therapeutic indications where activity in the kidney is not sought, exposure to kidney risks kidney toxicity without corresponding benefit. Moreover, high concentration in kidney typically results in loss of compound to the urine resulting in faster clearance. Accordingly for non-kidney targets, kidney accumulation is undesired.

[0501] In certain embodiments, the present disclosure provides conjugated antisense compounds represented by the formula:

[chemical structure]

[0502] wherein
[0503] A is the antisense oligonucleotide;
[0504] B is the cleavable moiety
[0505] C is the conjugate linker
[0506] D is the branching group
[0507] each E is a tether;
[0508] each F is a ligand; and
[0509] q is an integer between 1 and 5.

[0510] In the above diagram and in similar diagrams herein, the branching group “D” branches as many times as is necessary to accommodate the number of (E-F) groups as indicated by “q”. Thus, where q=1, the formula is:

A-B C-D-E-F
[0511] where q=2, the formula is:

[chemical structure]

[0512] where q=3, the formula is:

[chemical structure]

[0513] where q=4, the formula is:

[chemical structure]

[0514] where q=5, the formula is:

[chemical structure]

[0515] In certain embodiments, conjugated antisense compounds are provided having the structure:

[chemical structure]

[0516] In certain embodiments, conjugated antisense compounds are provided having the structure:

[chemical structure]

[0517] In certain embodiments, conjugated antisense compounds are provided having the structure:

[chemical structure]

[0518] In certain embodiments, conjugated antisense compounds are provided having the structure:

[chemical structure]

[0519] The present disclosure provides the following non-limiting numbered embodiments:

### Embodiment 1

[0520] The conjugated antisense compound of any of embodiments 1179 to 1182, wherein the tether has a structure selected from among:

[chemical structure]

wherein each n is independently, 0, 1, 2, 3, 4, 5, 6, or 7.

### Embodiment 2

[0521] The conjugated antisense compound of any of embodiments 1179 to 1182, wherein the tether has the structure:

[chemical structure]

### Embodiment 3

[0522] The conjugated antisense compound of any of embodiments 1179 to 1182 or 1688 to 1689, wherein the linker has a structure selected from among:

[chemical structure]

### Embodiment 4

[0523] The conjugated antisense compound of any of embodiments 1179 to 1182 or 1688 to 1689, wherein the linker has a structure selected from among:

[chemical structure]

[0524] wherein each n is independently, 0, 1, 2, 3, 4, 5, 6, or 7.

### Embodiment 5

[0525] The conjugated antisense compound of any of embodiments 1179 to 1182 or 1688 to 1689, wherein the linker has the structure:

[chemical structure]

[0526] In embodiments having more than one of a particular variable (e.g., more than one “m” or “n”), unless otherwise indicated, each such particular variable is selected independently. Thus, for a structure having more than one n, each n is selected independently, so they may or may not be the same as one another.

[0527] i. Certain Cleavable Moieties

[0528] In certain embodiments, a cleavable moiety is a cleavable bond. In certain embodiments, a cleavable moiety comprises a cleavable bond. In certain embodiments, the conjugate group comprises a cleavable moiety. In certain such embodiments, the cleavable moiety attaches to the antisense oligonucleotide. In certain such embodiments, the cleavable moiety attaches directly to the cell-targeting moiety. In certain such embodiments, the cleavable moiety attaches to the conjugate linker. In certain embodiments, the cleavable moiety comprises a phosphate or phosphodiester. In certain embodiments, the cleavable moiety is a cleavable nucleoside or nucleoside analog. In certain embodiments, the nucleoside or nucleoside analog comprises an optionally protected heterocyclic base selected from a purine, substituted purine, pyrimidine or substituted pyrimidine. In certain embodiments, the cleavable moiety is a nucleoside comprising an optionally protected heterocyclic base selected from uracil, thymine, cytosine, 4-N-benzoylcytosine, 5-methylcytosine, 4-N-benzoyl-5-methylcytosine, adenine, 6-N-benzoyladenine, guanine and 2-N-isobutyrylguanine. In certain embodiments, the cleavable moiety is 2′-deoxy nucleoside that is attached to the 3′ position of the antisense oligonucleotide by a phosphodiester linkage and is attached to the linker by a phosphodiester or phosphorothioate linkage. In certain embodiments, the cleavable moiety is 2′-deoxy adenosine that is attached to the 3′ position of the antisense oligonucleotide by a phosphodiester linkage and is attached to the linker by a phosphodiester or phosphorothioate linkage. In certain embodiments, the cleavable moiety is 2′-deoxy adenosine that is attached to the 3′ position of the antisense oligonucleotide by a phosphodiester linkage and is attached to the linker by a phosphodiester linkage.

[0529] In certain embodiments, the cleavable moiety is attached to the 3′ position of the antisense oligonucleotide. In certain embodiments, the cleavable moiety is attached to the 5′ position of the antisense oligonucleotide. In certain embodiments, the cleavable moiety is attached to a 2′ position of the antisense oligonucleotide. In certain embodiments, the cleavable moiety is attached to the antisense oligonucleotide by a phosphodiester linkage. In certain embodiments, the cleavable moiety is attached to the linker by either a phosphodiester or a phosphorothioate linkage. In certain embodiments, the cleavable moiety is attached to the linker by a phosphodiester linkage. In certain embodiments, the conjugate group does not include a cleavable moiety.

[0530] In certain embodiments, the cleavable moiety is cleaved after the complex has been administered to an animal only after being internalized by a targeted cell. Inside the cell the cleavable moiety is cleaved thereby releasing the active antisense oligonucleotide. While not wanting to be bound by theory it is believed that the cleavable moiety is cleaved by one or more nucleases within the cell. In certain embodiments, the one or more nucleases cleave the phosphodiester linkage between the cleavable moiety and the linker. In certain embodiments, the cleavable moiety has a structure selected from among the following:

[chemical structure]

wherein each of Bx, Bx₁, Bx₂, and Bx₃ is independently a heterocyclic base moiety. In certain embodiments, the cleavable moiety has a structure selected from among the following:

[chemical structure]

[0531] ii. Certain Linkers

[0532] In certain embodiments, the conjugate groups comprise a linker. In certain such embodiments, the linker is covalently bound to the cleavable moiety. In certain such embodiments, the linker is covalently bound to the antisense oligonucleotide. In certain embodiments, the linker is covalently bound to a cell-targeting moiety. In certain embodiments, the linker further comprises a covalent attachment to a solid support. In certain embodiments, the linker further comprises a covalent attachment to a protein binding moiety. In certain embodiments, the linker further comprises a covalent attachment to a solid support and further comprises a covalent attachment to a protein binding moiety. In certain embodiments, the linker includes multiple positions for attachment of tethered ligands. In certain embodiments, the linker includes multiple positions for attachment of tethered ligands and is not attached to a branching group. In certain embodiments, the linker further comprises one or more cleavable bond. In certain embodiments, the conjugate group does not include a linker.

[0533] In certain embodiments, the linker includes at least a linear group comprising groups selected from alkyl, amide, disulfide, polyethylene glycol, ether, thioether (—S—) and hydroxylamino (—O—N(H)—) groups. In certain embodiments, the linear group comprises groups selected from alkyl, amide and ether groups. In certain embodiments, the linear group comprises groups selected from alkyl and ether groups. In certain embodiments, the linear group comprises at least one phosphorus linking group. In certain embodiments, the linear group comprises at least one phosphodiester group. In certain embodiments, the linear group includes at least one neutral linking group. In certain embodiments, the linear group is covalently attached to the cell-targeting moiety and the cleavable moiety. In certain embodiments, the linear group is covalently attached to the cell-targeting moiety and the antisense oligonucleotide. In certain embodiments, the linear group is covalently attached to the cell-targeting moiety, the cleavable moiety and a solid support. In certain embodiments, the linear group is covalently attached to the cell-targeting moiety, the cleavable moiety, a solid support and a protein binding moiety. In certain embodiments, the linear group includes one or more cleavable bond.

[0534] In certain embodiments, the linker includes the linear group covalently attached to a scaffold group. In certain embodiments, the scaffold includes a branched aliphatic group comprising groups selected from alkyl, amide, disulfide, polyethylene glycol, ether, thioether and hydroxylamino groups. In certain embodiments, the scaffold includes a branched aliphatic group comprising groups selected from alkyl, amide and ether groups. In certain embodiments, the scaffold includes at least one mono or polycyclic ring system. In certain embodiments, the scaffold includes at least two mono or polycyclic ring systems. In certain embodiments, the linear group is covalently attached to the scaffold group and the scaffold group is covalently attached to the cleavable moiety and the linker. In certain embodiments, the linear group is covalently attached to the scaffold group and the scaffold group is covalently attached to the cleavable moiety, the linker and a solid support. In certain embodiments, the linear group is covalently attached to the scaffold group and the scaffold group is covalently attached to the cleavable moiety, the linker and a protein binding moiety. In certain embodiments, the linear group is covalently attached to the scaffold group and the scaffold group is covalently attached to the cleavable moiety, the linker, a protein binding moiety and a solid support. In certain embodiments, the scaffold group includes one or more cleavable bond.

[0535] In certain embodiments, the linker includes a protein binding moiety. In certain embodiments, the protein binding moiety is a lipid such as for example including but not limited to cholesterol, cholic acid, adamantane acetic acid, 1-pyrene butyric acid, dihydrotestosterone, 1,3-Bis-O(hexadecyl)glycerol, geranyloxyhexyl group, hexadecylglycerol, borneol, menthol, 1,3-propanediol, heptadecyl group, palmitic acid, myristic acid, O3-(oleoyl)lithocholic acid, O3-(oleoyl)cholenic acid, dimethoxytrityl, or phenoxazine), a vitamin (e.g., folate, vitamin A, vitamin E, biotin, pyridoxal), a peptide, a carbohydrate (e.g., monosaccharide, disaccharide, trisaccharide, tetrasaccharide, oligosaccharide, polysaccharide), an endosomolytic component, a steroid (e.g., uvaol, hecigenin, diosgenin), a terpene (e.g., triterpene, e.g., sarsasapogenin, friedelin, epifriedelanol derivatized lithocholic acid), or a cationic lipid. In certain embodiments, the protein binding moiety is a C16 to C22 long chain saturated or unsaturated fatty acid, cholesterol, cholic acid, vitamin E, adamantane or 1-pentafluoropropyl.

[0536] In certain embodiments, a linker has a structure selected from among:

[chemical structure]

[chemical structure]

[0537] wherein each n is, independently, from 1 to 20; and p is from 1 to 6.

[0538] In certain embodiments, a linker has a structure selected from among:

[chemical structure]

[chemical structure]

[0539] wherein each n is, independently, from 1 to 20.

[0540] In certain embodiments, a linker has a structure selected from among:

[chemical structure]

[chemical structure]

[0541] wherein n is from 1 to 20.

[0542] In certain embodiments, a linker has a structure selected from among:

[chemical structure]

[chemical structure]

[0543] wherein each L is, independently, a phosphorus linking group or a neutral linking group; and
[0544] each n is, independently, from 1 to 20.

[0545] In certain embodiments, a linker has a structure selected from among:

[chemical structure]

[chemical structure]

[chemical structure]

[chemical structure]

[0546] In certain embodiments, a linker has a structure selected from among:

[chemical structure]

[chemical structure]

[0547] In certain embodiments, a linker has a structure selected from among:

[chemical structure]

[chemical structure]

[0548] In certain embodiments, a linker has a structure selected from among:

[chemical structure]

[0549] wherein n is from 1 to 20.

[0550] In certain embodiments, a linker has a structure selected from among:

[chemical structure]

[0551] In certain embodiments, a linker has a structure selected from among:

[chemical structure]

[0552] In certain embodiments, a linker has a structure selected from among:

[chemical structure]

[0553] In certain embodiments, the conjugate linker has the structure:

[chemical structure]

[0554] In certain embodiments, the conjugate linker has the structure:

[chemical structure]

[0555] In certain embodiments, a linker has a structure selected from among:

[chemical structure]

[0556] In certain embodiments, a linker has a structure selected from among:

[chemical structure]

[0557] wherein each n is independently, 0, 1, 2, 3, 4, 5, 6, or 7.

[0558] iii. Certain Cell-Targeting Moieties

[0559] In certain embodiments, conjugate groups comprise cell-targeting moieties. Certain such cell-targeting moieties increase cellular uptake of antisense compounds. In certain embodiments, cell-targeting moieties comprise a branching group, one or more tether, and one or more ligand. In certain embodiments, cell-targeting moieties comprise a branching group, one or more tether, one or more ligand and one or more cleavable bond.

[0560] 1. Certain Branching Groups

[0561] In certain embodiments, the conjugate groups comprise a targeting moiety comprising a branching group and at least two tethered ligands. In certain embodiments, the branching group attaches the conjugate linker. In certain embodiments, the branching group attaches the cleavable moiety. In certain embodiments, the branching group attaches the antisense oligonucleotide. In certain embodiments, the branching group is covalently attached to the linker and each of the tethered ligands. In certain embodiments, the branching group comprises a branched aliphatic group comprising groups selected from alkyl, amide, disulfide, polyethylene glycol, ether, thioether and hydroxylamino groups. In certain embodiments, the branching group comprises groups selected from alkyl, amide and ether groups. In certain embodiments, the branching group comprises groups selected from alkyl and ether groups. In certain embodiments, the branching group comprises a mono or polycyclic ring system. In certain embodiments, the branching group comprises one or more cleavable bond. In certain embodiments, the conjugate group does not include a branching group.

[0562] In certain embodiments, a branching group has a structure selected from among:

[chemical structure]

[chemical structure]

[chemical structure]

[chemical structure]

[0563] wherein each n is, independently, from 1 to 20;
[0564] j is from 1 to 3; and
[0565] m is from 2 to 6.

[0566] In certain embodiments, a branching group has a structure selected from among:

[chemical structure]

[chemical structure]

[0567] wherein each n is, independently, from 1 to 20; and
[0568] m is from 2 to 6.

[0569] In certain embodiments, a branching group has a structure selected from among:

[chemical structure]

[chemical structure]

[chemical structure]

[0570] In certain embodiments, a branching group has a structure selected from among:

[chemical structure]

[0571] wherein each A₁ is independently, O, S, C═O or NH; and
[0572] each n is, independently, from 1 to 20.

[0573] In certain embodiments, a branching group has a structure selected from among:

[chemical structure]

[0574] wherein each A₁ is independently, O, S, C═O or NH; and
[0575] each n is, independently, from 1 to 20.

[0576] In certain embodiments, a branching group has a structure selected from among:

[chemical structure]

[0577] wherein A₁ is O, S, C═O or NH; and
[0578] each n is, independently, from 1 to 20.

[0579] In certain embodiments, a branching group has a structure selected from among:

[chemical structure]

[0580] In certain embodiments, a branching group has a structure selected from among:

[chemical structure]

[0581] In certain embodiments, a branching group has a structure selected from among:

[chemical structure]

[0582] 2. Certain Tethers

[0583] In certain embodiments, conjugate groups comprise one or more tethers covalently attached to the branching group. In certain embodiments, conjugate groups comprise one or more tethers covalently attached to the linking group. In certain embodiments, each tether is a linear aliphatic group comprising one or more groups selected from alkyl, ether, thioether, disulfide, amide and polyethylene glycol groups in any combination. In certain embodiments, each tether is a linear aliphatic group comprising one or more groups selected from alkyl, substituted alkyl, ether, thioether, disulfide, amide, phosphodiester and polyethylene glycol groups in any combination. In certain embodiments, each tether is a linear aliphatic group comprising one or more groups selected from alkyl, ether and amide groups in any combination. In certain embodiments, each tether is a linear aliphatic group comprising one or more groups selected from alkyl, substituted alkyl, phosphodiester, ether and amide groups in any combination. In certain embodiments, each tether is a linear aliphatic group comprising one or more groups selected from alkyl and phosphodiester in any combination. In certain embodiments, each tether comprises at least one phosphorus linking group or neutral linking group.

[0584] In certain embodiments, the tether includes one or more cleavable bond. In certain embodiments, the tether is attached to the branching group through either an amide or an ether group. In certain embodiments, the tether is attached to the branching group through a phosphodiester group. In certain embodiments, the tether is attached to the branching group through a phosphorus linking group or neutral linking group. In certain embodiments, the tether is attached to the branching group through an ether group. In certain embodiments, the tether is attached to the ligand through either an amide or an ether group. In certain embodiments, the tether is attached to the ligand through an ether group. In certain embodiments, the tether is attached to the ligand through either an amide or an ether group. In certain embodiments, the tether is attached to the ligand through an ether group.

[0585] In certain embodiments, each tether comprises from about 8 to about 20 atoms in chain length between the ligand and the branching group. In certain embodiments, each tether group comprises from about 10 to about 18 atoms in chain length between the ligand and the branching group. In certain embodiments, each tether group comprises about 13 atoms in chain length.

[0586] In certain embodiments, a tether has a structure selected from among:

[chemical structure]

[0587] wherein each n is, independently, from 1 to 20; and
[0588] each p is from 1 to about 6.

[0589] In certain embodiments, a tether has a structure selected from among:

[chemical structure]

[0590] In certain embodiments, a tether has a structure selected from among:

[chemical structure]

[0591] wherein each n is, independently, from 1 to 20.

[0592] In certain embodiments, a tether has a structure selected from among:

[chemical structure]

[0593] wherein L is either a phosphorus linking group or a neutral linking group;
[0594] Z₁ is C(═O)O—R₂;
[0595] Z₂ is H, C₁-C₆ alkyl or substituted C₁-C₆ alky;
[0596] R₂ is H, C₁-C₆ alkyl or substituted C₁-C₆ alky; and
[0597] each m₁ is, independently, from 0 to 20 wherein at least one m₁ is greater than 0 for each tether.

[0598] In certain embodiments, a tether has a structure selected from among:

[chemical structure]

[0599] In certain embodiments, a tether has a structure selected from among:

[chemical structure]

[0600] wherein Z₂ is H or CH₃; and
[0601] each m₁ is, independently, from 0 to 20 wherein at least one m₁ is greater than 0 for each tether.

[0602] In certain embodiments, a tether has a structure selected from among:

[chemical structure]

wherein each n is independently, 0, 1, 2, 3, 4, 5, 6, or 7.

[0603] In certain embodiments, a tether comprises a phosphorus linking group. In certain embodiments, a tether does not comprise any amide bonds. In certain embodiments, a tether comprises a phosphorus linking group and does not comprise any amide bonds.

[0604] 3. Certain Ligands

[0605] In certain embodiments, the present disclosure provides ligands wherein each ligand is covalently attached to a tether. In certain embodiments, each ligand is selected to have an affinity for at least one type of receptor on a target cell. In certain embodiments, ligands are selected that have an affinity for at least one type of receptor on the surface of a mammalian liver cell. In certain embodiments, ligands are selected that have an affinity for the hepatic asialoglycoprotein receptor (ASGP-R). In certain embodiments, each ligand is a carbohydrate. In certain embodiments, each ligand is, independently selected from galactose, N-acetyl galactoseamine, mannose, glucose, glucosamone and fucose. In certain embodiments, each ligand is N-acetyl galactoseamine (GalNAc). In certain embodiments, the targeting moiety comprises 2 to 6 ligands. In certain embodiments, the targeting moiety comprises 3 ligands. In certain embodiments, the targeting moiety comprises 3 N-acetyl galactoseamine ligands.

[0606] In certain embodiments, the ligand is a carbohydrate, carbohydrate derivative, modified carbohydrate, multivalent carbohydrate cluster, polysaccharide, modified polysaccharide, or polysaccharide derivative. In certain embodiments, the ligand is an amino sugar or a thio sugar. For example, amino sugars may be selected from any number of compounds known in the art, for example glucosamine, sialic acid, α-D-galactosamine, N-Acetylgalactosamine, 2-acetamido-2-deoxy-D-galactopyranose (GalNAc), 2-Amino-3-O—[(R)-1-carboxyethyl]-2-deoxy-β-D-glucopyranose (β-muramic acid), 2-Deoxy-2-methylamino-L-glucopyranose, 4,6-Dideoxy-4-formamido-2,3-di-O-methyl-D-mannopyranose, 2-Deoxy-2-sulfoamino-D-glucopyranose and N-sulfo-D-glucosamine, and N-Glycoloyl-α-neuraminic acid. For example, thio sugars may be selected from the group consisting of 5-Thio-β-D-glucopyranose, Methyl 2,3,4-tri-O-acetyl-1-thio-6-O-trityl-α-D-glucopyranoside, 4-Thio-β-D-galactopyranose, and ethyl 3,4,6,7-tetra-O-acetyl-2-deoxy-1,5-dithio-α-D-gluco-heptopyranoside.

[0607] In certain embodiments, “GalNAc” or “Gal-NAc” refers to 2-(Acetylamino)-2-deoxy-D-galactopyranose, commonly referred to in the literature as N-acetyl galactosamine. In certain embodiments, “N-acetyl galactosamine” refers to 2-(Acetylamino)-2-deoxy-D-galactopyranose. In certain embodiments, “GalNAc” or “Gal-NAc” refers to 2-(Acetylamino)-2-deoxy-D-galactopyranose. In certain embodiments, “GalNAc” or “Gal-NAc” refers to 2-(Acetylamino)-2-deoxy-D-galactopyranose, which includes both the β-form: 2-(Acetylamino)-2-deoxy-β-D-galactopyranose and α-form: 2-(Acetylamino)-2-deoxy-D-galactopyranose. In certain embodiments, both the β-form: 2-(Acetylamino)-2-deoxy-β-D-galactopyranose and α-form: 2-(Acetylamino)-2-deoxy-D-galactopyranose may be used interchangeably. Accordingly, in structures in which one form is depicted, these structures are intended to include the other form as well. For example, where the structure for an α-form: 2-(Acetylamino)-2-deoxy-D-galactopyranose is shown, this structure is intended to include the other form as well. In certain embodiments, In certain preferred embodiments, the β-form 2-(Acetylamino)-2-deoxy-D-galactopyranose is the preferred embodiment.

[chemical structure]

[0608] In certain embodiments one or more ligand has a structure selected from among:

[chemical structure]

[0609] wherein each R₁ is selected from OH and NHCOOH.

[0610] In certain embodiments one or more ligand has a structure selected from among:

[chemical structure]

[0611] In certain embodiments one or more ligand has a structure selected from among:

[chemical structure]

[0612] In certain embodiments one or more ligand has a structure selected from among:

[chemical structure]

[0613] i. Certain Conjugates

[0614] In certain embodiments, conjugate groups comprise the structural features above. In certain such embodiments, conjugate groups have the following structure:

[chemical structure]

[0615] wherein each n is, independently, from 1 to 20.

[0616] In certain such embodiments, conjugate groups have the following structure:

[chemical structure]

[0617] In certain such embodiments, conjugate groups have the following structure:

[chemical structure]

[0618] wherein each n is, independently, from 1 to 20;
[0619] Z is H or a linked solid support;
[0620] Q is an antisense compound;
[0621] X is O or S; and
[0622] Bx is a heterocyclic base moiety.

[0623] In certain such embodiments, conjugate groups have the following structure:

[chemical structure]

[0624] In certain such embodiments, conjugate groups have the following structure:

[chemical structure]

[0625] In certain such embodiments, conjugate groups have the following structure:

[chemical structure]

[0626] In certain such embodiments, conjugate groups have the following structure:

[chemical structure]

[0627] In certain such embodiments, conjugate groups have the following structure:

[chemical structure]

[0628] In certain such embodiments, conjugate groups have the following structure:

[chemical structure]

[0629] In certain such embodiments, conjugate groups have the following structure:

[chemical structure]

[0630] In certain such embodiments, conjugate groups have the following structure:

[chemical structure]

[0631] In certain embodiments, conjugates do not comprise a pyrrolidine.

[0632] In certain such embodiments, conjugate groups have the following structure:

[chemical structure]

[0633] In certain such embodiments, conjugate groups have the following structure:

[chemical structure]

[0634] In certain such embodiments, conjugate groups have the following structure:

[chemical structure]

[0635] In certain such embodiments, conjugate groups have the following structure:

[chemical structure]

[0636] In certain such embodiments, conjugate groups have the following structure:

[chemical structure]

[0637] In certain such embodiments, conjugate groups have the following structure:

[chemical structure]

[0638] In certain such embodiments, conjugate groups have the following structure:

[chemical structure]

[0639] In certain such embodiments, conjugate groups have the following structure:

[chemical structure]

[0640] In certain such embodiments, conjugate groups have the following structure:

[chemical structure]

[0641] In certain such embodiments, conjugate groups have the following structure:

[chemical structure]

[0642] In certain such embodiments, conjugate groups have the following structure:

[chemical structure]

[0643] In certain embodiments, the cell-targeting moiety of the conjugate group has the following structure:

[chemical structure]

wherein X is a substituted or unsubstituted tether of six to eleven consecutively bonded atoms.

[0644] In certain embodiments, the cell-targeting moiety of the conjugate group has the following structure:

[chemical structure]

wherein X is a substituted or unsubstituted tether of ten consecutively bonded atoms.

[0645] In certain embodiments, the cell-targeting moiety of the conjugate group has the following structure:

[chemical structure]

wherein X is a substituted or unsubstituted tether of four to eleven consecutively bonded atoms and wherein the tether comprises exactly one amide bond.

[0646] In certain embodiments, the cell-targeting moiety of the conjugate group has the following structure:

[chemical structure]

wherein Y and Z are independently selected from a C₁-C₁₂ substituted or unsubstituted alkyl, alkenyl, or alkynyl group, or a group comprising an ether, a ketone, an amide, an ester, a carbamate, an amine, a piperidine, a phosphate, a phosphodiester, a phosphorothioate, a triazole, a pyrrolidine, a disulfide, or a thioether.

[0647] In certain such embodiments, the cell-targeting moiety of the conjugate group has the following structure:

[chemical structure]

wherein Y and Z are independently selected from a C₁-C₁₂ substituted or unsubstituted alkyl group, or a group comprising exactly one ether or exactly two ethers, an amide, an amine, a piperidine, a phosphate, a phosphodiester, or a phosphorothioate.

[0648] In certain such embodiments, the cell-targeting moiety of the conjugate group has the following structure:

[chemical structure]

wherein Y and Z are independently selected from a C₁-C₁₂ substituted or unsubstituted alkyl group.

[0649] In certain such embodiments, the cell-targeting moiety of the conjugate group has the following structure:

[chemical structure]

wherein m and n are independently selected from 1, 2, 3, 4, 5, 6, 7, 8, 9, 10, 11, and 12.

[0650] In certain such embodiments, the cell-targeting moiety of the conjugate group has the following structure:

[chemical structure]

wherein m is 4, 5, 6, 7, or 8, and n is 1, 2, 3, or 4.

[0651] In certain embodiments, the cell-targeting moiety of the conjugate group has the following structure:

[chemical structure]

wherein X is a substituted or unsubstituted tether of four to thirteen consecutively bonded atoms, and wherein X does not comprise an ether group.

[0652] In certain embodiments, the cell-targeting moiety of the conjugate group has the following structure:

[chemical structure]

wherein X is a substituted or unsubstituted tether of eight consecutively bonded atoms, and wherein X does not comprise an ether group.

[0653] In certain embodiments, the cell-targeting moiety of the conjugate group has the following structure:

[chemical structure]

wherein X is a substituted or unsubstituted tether of four to thirteen consecutively bonded atoms, and wherein the tether comprises exactly one amide bond, and wherein X does not comprise an ether group.

[0654] In certain embodiments, the cell-targeting moiety of the conjugate group has the following structure:

[chemical structure]

wherein X is a substituted or unsubstituted tether of four to thirteen consecutively bonded atoms and wherein the tether consists of an amide bond and a substituted or unsubstituted C₂-C₁₁ alkyl group.

[0655] In certain embodiments, the cell-targeting moiety of the conjugate group has the following structure:

[chemical structure]

wherein Y is selected from a C₁-C₁₂ substituted or unsubstituted alkyl, alkenyl, or alkynyl group, or a group comprising an ether, a ketone, an amide, an ester, a carbamate, an amine, a piperidine, a phosphate, a phosphodiester, a phosphorothioate, a triazole, a pyrrolidine, a disulfide, or a thioether.

[0656] In certain such embodiments, the cell-targeting moiety of the conjugate group has the following structure:

[chemical structure]

wherein Y is selected from a C₁-C₁₂ substituted or unsubstituted alkyl group, or a group comprising an ether, an amine, a piperidine, a phosphate, a phosphodiester, or a phosphorothioate.

[0657] In certain such embodiments, the cell-targeting moiety of the conjugate group has the following structure:

[chemical structure]

wherein Y is selected from a C₁-C₁₂ substituted or unsubstituted alkyl group.

[0658] In certain such embodiments, the cell-targeting moiety of the conjugate group has the following structure:

[chemical structure]

### Wherein n is 1, 2, 3, 4, 5, 6, 7, 8, 9, 10, 11, or 12.

[0659] In certain such embodiments, the cell-targeting moiety of the conjugate group has the following structure:

[chemical structure]

wherein n is 4, 5, 6, 7, or 8.

[0660] In certain embodiments, conjugates do not comprise a pyrrolidine.

### a Certain Conjugated Antisense Compounds

[0661] In certain embodiments, the conjugates are bound to a nucleoside of the antisense oligonucleotide at the 2′, 3′, of 5′ position of the nucleoside. In certain embodiments, a conjugated antisense compound has the following structure:

[chemical structure]

[0662] wherein
[0663] A is the antisense oligonucleotide;
[0664] B is the cleavable moiety
[0665] C is the conjugate linker
[0666] D is the branching group
[0667] each E is a tether;
[0668] each F is a ligand; and
[0669] q is an integer between 1 and 5.

[0670] In certain embodiments, a conjugated antisense compound has the following structure:

[chemical structure]

[0671] wherein
[0672] A is the antisense oligonucleotide;
[0673] C is the conjugate linker
[0674] D is the branching group
[0675] each E is a tether;
[0676] each F is a ligand; and
[0677] q is an integer between 1 and 5.

[0678] In certain such embodiments, the conjugate linker comprises at least one cleavable bond.

[0679] In certain such embodiments, the branching group comprises at least one cleavable bond.

[0680] In certain embodiments each tether comprises at least one cleavable bond.

[0681] In certain embodiments, the conjugates are bound to a nucleoside of the antisense oligonucleotide at the 2′, 3′, of 5′ position of the nucleoside.

[0682] In certain embodiments, a conjugated antisense compound has the following structure:

[chemical structure]

[0683] wherein
[0684] A is the antisense oligonucleotide;
[0685] B is the cleavable moiety
[0686] C is the conjugate linker
[0687] each E is a tether;
[0688] each F is a ligand; and
[0689] q is an integer between 1 and 5.

[0690] In certain embodiments, the conjugates are bound to a nucleoside of the antisense oligonucleotide at the 2′, 3′, of 5′ position of the nucleoside. In certain embodiments, a conjugated antisense compound has the following structure:

[chemical structure]

[0691] wherein
[0692] A is the antisense oligonucleotide;
[0693] C is the conjugate linker
[0694] each E is a tether;
[0695] each F is a ligand; and
[0696] q is an integer between 1 and 5.

[0697] In certain embodiments, a conjugated antisense compound has the following structure:

[chemical structure]

[0698] wherein
[0699] A is the antisense oligonucleotide;
[0700] B is the cleavable moiety
[0701] D is the branching group
[0702] each E is a tether;
[0703] each F is a ligand; and
[0704] q is an integer between 1 and 5.

[0705] In certain embodiments, a conjugated antisense compound has the following structure:

[chemical structure]

[0706] wherein
[0707] A is the antisense oligonucleotide;
[0708] D is the branching group
[0709] each E is a tether;
[0710] each F is a ligand; and
[0711] q is an integer between 1 and 5.

[0712] In certain such embodiments, the conjugate linker comprises at least one cleavable bond.

[0713] In certain embodiments each tether comprises at least one cleavable bond.

[0714] In certain embodiments, a conjugated antisense compound has a structure selected from among the following:

[chemical structure]

[0715] In certain embodiments, a conjugated antisense compound has a structure selected from among the following:

[chemical structure]

[0716] In certain embodiments, a conjugated antisense compound has a structure selected from among the following:

[chemical structure]

[0717] In certain embodiments, the conjugated antisense compound has the following structure: In certain embodiments, a compound comprises an ISIS oligonucleotide targeting GHR conjugated to GalNAc on the 5′ end. For instance, in certain embodiments, a compound comprises ISIS 532401 conjugated to GalNAc on the 5′ end. In further embodiments, the compound has the following chemical structure comprising or consisting of ISIS 532401 with 5′-X, wherein X is a conjugate group comprising GalNAc as described herein:

[chemical structure]

[0718] wherein X is a conjugate group comprising GalNAc.

[0719] In certain embodiments, a compound comprises an ISIS oligonucleotide targeting GHR conjugated to GalNAc, and wherein each internucleoside linkage of the oligonucleotide com is a phosphorothioate linkage. In further embodiments, the compound comprises the sequence of ISIS 532401 conjugated to GalNAc, and wherein each internucleoside linkage of the oligonucleotide com is a phosphorothioate linkage. In such embodiments, the chemical structure is as follows:

[chemical structure]

[0720] In certain embodiments, a compound comprises an ISIS oligonucleotide targeting GHR conjugated to GalNAc, and wherein each internucleoside linkage of the oligonucleotide com is a phosphorothioate linkage or a phosphodiester linkage. In further embodiments, the compound comprises the sequence of ISIS 532401 conjugated to GalNAc, and wherein each internucleoside linkage of the oligonucleotide com is a phosphorothioate linkage or a phosphodiester linkage. In such embodiments, the chemical structure is as follows:

[chemical structure]

[0721] In certain embodiments, a compound comprises an ISIS oligonucleotide targeting GHR conjugated to GalNAc. In further such embodiments, the compound comprises the sequence of ISIS 532401 conjugated to GalNAc, and is represented by the following chemical structure:

[chemical structure]

[0722] Wherein either R¹ is —OCH₂CH₂OCH₃ (MOE) and R² is H; or R¹ and R² together form a bridge, wherein R¹ is —O— and R² is —CH₂—, —CH(CH₃)—, or —CH₂CH₂—, and R¹ and R² are directly connected such that the resulting bridge is selected from: —O—CH₂—, —O—CH(CH₃)—, and —O—CH₂CH₂—;
[0723] And for each pair of R³ and R⁴ on the same ring, independently for each ring: either R³ is selected from H and —OCH₂CH₂OCH₃ and R⁴ is H; or R³ and R⁴ together form a bridge, wherein R³ is —O—, and R⁴ is —CH₂—, —CH(CH₃)—, or —CH₂CH₂— and R³ and R⁴ are directly connected such that the resulting bridge is selected from: —O—CH₂—, —O—CH(CH₃)—, and —O—CH₂CH₂—;
[0724] And R⁵ is selected from H and —CH₃;
[0725] And Z is selected from S⁻ and O⁻.

[0726] Representative United States patents, United States patent application publications, and international patent application publications that teach the preparation of certain of the above noted conjugates, conjugated antisense compounds, tethers, linkers, branching groups, ligands, cleavable moieties as well as other modifications include without limitation, U.S. Pat. No. 5,994,517, U.S. Pat. No. 6,300,319, U.S. Pat. No. 6,660,720, U.S. Pat. No. 6,906,182, U.S. Pat. No. 7,262,177, U.S. Pat. No. 7,491,805, U.S. Pat. No. 8,106,022, U.S. Pat. No. 7,723,509, US 2006/0148740, US 2011/0123520, WO 2013/033230 and WO 2012/037254, each of which is incorporated by reference herein in its entirety.

[0727] Representative publications that teach the preparation of certain of the above noted conjugates, conjugated antisense compounds, tethers, linkers, branching groups, ligands, cleavable moieties as well as other modifications include without limitation, BIESSEN et al., “The Cholesterol Derivative of a Triantennary Galactoside with High Affinity for the Hepatic Asialoglycoprotein Receptor: a Potent Cholesterol Lowering Agent” J. Med. Chem. (1995) 38:1846-1852, BIESSEN et al., “Synthesis of Cluster Galactosides with High Affinity for the Hepatic Asialoglycoprotein Receptor” J. Med. Chem. (1995) 38:1538-1546, LEE et al., “New and more efficient multivalent glyco-ligands for asialoglycoprotein receptor of mammalian hepatocytes” Bioorganic & Medicinal Chemistry (2011) 19:2494-2500, RENSEN et al., “Determination of the Upper Size Limit for Uptake and Processing of Ligands by the Asialoglycoprotein Receptor on Hepatocytes in Vitro and in Vivo” J. Biol. Chem. (2001) 276(40):37577-37584, RENSEN et al., “Design and Synthesis of Novel N-Acetylgalactosamine-Terminated Glycolipids for Targeting of Lipoproteins to the Hepatic Asialoglycoprotein Receptor” J. Med. Chem. (2004) 47:5798-5808, SLIEDREGT et al., “Design and Synthesis of Novel Amphiphilic Dendritic Galactosides for Selective Targeting of Liposomes to the Hepatic Asialoglycoprotein Receptor” J. Med. Chem. (1999) 42:609-618, and Valentijn et al., “Solid-phase synthesis of lysine-based cluster galactosides with high affinity for the Asialoglycoprotein Receptor” Tetrahedron, 1997, 53(2), 759-770, each of which is incorporated by reference herein in its entirety.

[0728] In certain embodiments, conjugated antisense compounds comprise an RNase H based oligonucleotide (such as a gapmer) or a splice modulating oligonucleotide (such as a fully modified oligonucleotide) and any conjugate group comprising at least one, two, or three GalNAc groups. In certain embodiments a conjugated antisense compound comprises any conjugate group found in any of the following references: Lee, Carbohydr Res, 1978, 67, 509-514; Connolly et al., J Biol Chem, 1982, 257, 939-945; Pavia et al., Int J Pep Protein Res, 1983, 22, 539-548; Lee et al., Biochem, 1984, 23, 4255-4261; Lee et al., Glycoconjugate J, 1987, 4, 317-328; Toyokuni et al., Tetrahedron Lett, 1990, 31, 2673-2676; Biessen et al., J Med Chem, 1995, 38, 1538-1546; Valentijn et al., Tetrahedron, 1997, 53, 759-770; Kim et al., Tetrahedron Lett, 1997, 38, 3487-3490; Lee et al., Bioconjug Chem, 1997, 8, 762-765; Kato et al., Glycobiol, 2001, 11, 821-829; Rensen et al., J Biol Chem, 2001, 276, 37577-37584; Lee et al., Methods Enzymol, 2003, 362, 38-43; Westerlind et al., Glycoconj J, 2004, 21, 227-241; Lee et al., Bioorg Med Chem Lett, 2006, 16(19), 5132-5135; Maierhofer et al., Bioorg Med Chem, 2007, 15, 7661-7676; Khorev et al., Bioorg Med Chem, 2008, 16, 5216-5231; Lee et al., Bioorg Med Chem, 2011, 19, 2494-2500; Komilova et al., Analyt Biochem, 2012, 425, 43-46; Pujol et al., Angew Chemie Int Ed Engl, 2012, 51, 7445-7448; Biessen et al., J Med Chem, 1995, 38, 1846-1852; Sliedregt et al., J Med Chem, 1999, 42, 609-618; Rensen et al., J Med Chem, 2004, 47, 5798-5808; Rensen et al., Arterioscler Thromb Vasc Biol, 2006, 26, 169-175; van Rossenberg et al., Gene Ther, 2004, 11, 457-464; Sato et al., J Am Chem Soc, 2004, 126, 14013-14022; Lee et al., J Org Chem, 2012, 77, 7564-7571; Biessen et al., FASEB J, 2000, 14, 1784-1792; Rajur et al., Bioconjug Chem, 1997, 8, 935-940; Duff et al., Methods Enzymol, 2000, 313, 297-321; Maier et al., Bioconjug Chem, 2003, 14, 18-29; Jayaprakash et al., Org Lett, 2010, 12, 5410-5413; Manoharan, Antisense Nucleic Acid Drug Dev, 2002, 12, 103-128; Merwin et al., Bioconjug Chem, 1994, 5, 612-620; Tomiya et al., Bioorg Med Chem, 2013, 21, 5275-5281; International applications WO1998/013381; WO2011/038356; WO1997/046098; WO2008/098788; WO2004/101619; WO2012/037254; WO2011/120053; WO2011/100131; WO2011/163121; WO2012/177947; WO2013/033230; WO2013/075035; WO2012/083185; WO2012/083046; WO2009/082607; WO2009/134487; WO2010/144740; WO2010/148013; WO1997/020563; WO2010/088537; WO2002/043771; WO2010/129709; WO2012/068187; WO2009/126933; WO2004/024757; WO2010/054406; WO2012/089352; WO2012/089602; WO2013/166121; WO2013/165816; U.S. Pat. Nos. 4,751,219; 8,552,163; 6,908,903; 7,262,177; 5,994,517; 6,300,319; 8,106,022; 7,491,805; 7,491,805; 7,582,744; 8,137,695; 6,383,812; 6,525,031; 6,660,720; 7,723,509; 8,541,548; 8,344,125; 8,313,772; 8,349,308; 8,450,467; 8,501,930; 8,158,601; 7,262,177; 6,906,182; 6,620,916; 8,435,491; 8,404,862; 7,851,615; Published U.S. Patent Application Publications US2011/0097264; US2011/0097265; US2013/0004427; US2005/0164235; US2006/0148740; US2008/0281044; US2010/0240730; US2003/0119724; US2006/0183886; US2008/0206869; US2011/0269814; US2009/0286973; US2011/0207799; US2012/0136042; US2012/0165393; US2008/0281041; US2009/0203135; US2012/0035115; US2012/0095075; US2012/0101148; US2012/0128760; US2012/0157509; US2012/0230938; US2013/0109817; US2013/0121954; US2013/0178512; US2013/0236968; US2011/0123520; US2003/0077829; US2008/0108801; and US2009/0203132; each of which is incorporated by reference in its entirety.

### In Vitro Testing of Antisense Oligonucleotides

[0729] Described herein are methods for treatment of cells with antisense oligonucleotides, which can be modified appropriately for treatment with other antisense compounds.

[0730] Cells may be treated with antisense oligonucleotides when the cells reach approximately 60-80% confluency in culture.

[0731] One reagent commonly used to introduce antisense oligonucleotides into cultured cells includes the cationic lipid transfection reagent LIPOFECTIN (Invitrogen, Carlsbad, Calif.). Antisense oligonucleotides may be mixed with LIPOFECTIN in OPTI-MEM 1 (Invitrogen, Carlsbad, Calif.) to achieve the desired final concentration of antisense oligonucleotide and a LIPOFECTIN concentration that may range from 2 to 12 ug/mL per 100 nM antisense oligonucleotide.

[0732] Another reagent used to introduce antisense oligonucleotides into cultured cells includes LIPOFECTAMINE (Invitrogen, Carlsbad, Calif.). Antisense oligonucleotide is mixed with LIPOFECTAMINE in OPTI-MEM 1 reduced serum medium (Invitrogen, Carlsbad, Calif.) to achieve the desired concentration of antisense oligonucleotide and a LIPOFECTAMINE concentration that may range from 2 to 12 ug/mL per 100 nM antisense oligonucleotide.

[0733] Another technique used to introduce antisense oligonucleotides into cultured cells includes electroporation.

[0734] Yet another technique used to introduce antisense oligonucleotides into cultured cells includes free uptake of the oligonucleotides by the cells.

[0735] Cells are treated with antisense oligonucleotides by routine methods. Cells may be harvested 16-24 hours after antisense oligonucleotide treatment, at which time RNA or protein levels of target nucleic acids are measured by methods known in the art and described herein. In general, when treatments are performed in multiple replicates, the data are presented as the average of the replicate treatments.

[0736] The concentration of antisense oligonucleotide used varies from cell line to cell line. Methods to determine the optimal antisense oligonucleotide concentration for a particular cell line are well known in the art. Antisense oligonucleotides are typically used at concentrations ranging from 1 nM to 300 nM when transfected with LIPOFECTAMINE. Antisense oligonucleotides are used at higher concentrations ranging from 625 to 20,000 nM when transfected using electroporation.

### RNA Isolation

[0737] RNA analysis can be performed on total cellular RNA or poly(A)+ mRNA. Methods of RNA isolation are well known in the art. RNA is prepared using methods well known in the art, for example, using the TRIZOL Reagent (Invitrogen, Carlsbad, Calif.) according to the manufacturer's recommended protocols.

### Certain Indications

[0738] Certain embodiments provided herein relate to methods of treating, preventing, or ameliorating a disease associated with excess growth hormone in a subject by administering a GHR specific inhibitor, such as an antisense compound or oligonucleotide targeted to GHR. In certain aspects, the disease associated with excess growth hormone is acromegaly. In certain aspects, the disease associated with excess growth hormone is gigantism.

[0739] Certain embodiments provide a method of treating, preventing, or ameliorating acromegaly in a subject by administering a GHR specific inhibitor, such as an antisense compound or oligonucleotide targeted to GHR. Acromegaly is a disease associated with excess growth hormone (GH). In over 90 percent of acromegaly patients, the overproduction of growth hormones is caused by a benign tumor of the pituitary gland, called an adenoma, which produces excess growth hormone and compresses surrounding brain tissues. Expansion of the adenoma can cause headaches and visual impairment that often accompany acromegaly. In some instances, acromegaly is caused by tumors of the pancreas, lungs, or adrenal glands that lead to an excess of GH, either by producing GH or by producing Growth Hormone Releasing Hormone (GHRH), the hormone that stimulates the pituitary to make GH.

[0740] Acromegaly most commonly affects adults in middle age and can result in severe disfigurement, complicating conditions, and premature death. Because of its pathogenesis and slow progression, acromegaly often goes undiagnosed until changes in external features become noticeable, such as changes in the face. Acromegaly is often associated with gigantism.

[0741] Features of acromegaly include soft tissue swelling resulting in enlargement of the hands, feet, nose, lips and ears, and a general thickening of the skin; soft tissue swelling of internal organs, such as the heart and kidney; vocal cord swelling resulting in a low voice and slow speech; expansion of the skull; pronounced eyebrow protrusion, often with ocular distension; pronounced lower jaw protrusion and enlargement of the tongue; teeth gapping; and carpal tunnel syndrome. In certain embodiments, any one or combination of these features of acromegaly can be treated, prevented, or ameliorated by administering a compound or composition targeted to GHR provided herein.

### EXAMPLES

### Non-Limiting Disclosure and Incorporation by Reference

[0742] While certain compounds, compositions and methods described herein have been described with specificity in accordance with certain embodiments, the following examples serve only to illustrate the compounds described herein and are not intended to limit the same. Each of the references recited in the present application is incorporated herein by reference in its entirety.

[0743] It is understood that the sequence set forth in each SEQ ID NO in the examples contained herein is independent of any modification to a sugar moiety, an internucleoside linkage, or a nucleobase. As such, antisense compounds defined by a SEQ ID NO may comprise, independently, one or more modifications to a sugar moiety, an internucleoside linkage, or a nucleobase. Antisense compounds described by Isis Number (Isis No) indicate a combination of nucleobase sequence and motif.

[0744] The following examples illustrate certain embodiments of the present disclosure and are not limiting. Moreover, where specific embodiments are provided, the inventors have contemplated generic application of those specific embodiments. For example, disclosure of an oligonucleotide having a particular motif provides reasonable support for additional oligonucleotides having the same or similar motif. And, for example, where a particular high-affinity modification appears at a particular position, other high-affinity modifications at the same position are considered suitable, unless otherwise indicated.

### Example 1: General Method for the Preparation of Phosphoramidites, Compounds 1, 1a and 2

[0745] Compounds 1, 1a and 2 were prepared as per the procedures well known in the art as described in the specification herein (see Seth et al., Bioorg. Med. Chem., 2011, 21(4), 1122-1125, J. Org. Chem., 2010, 75(5), 1569-1581, Nucleic Acids Symposium Series, 2008, 52(1), 553-554); and also see published PCT International Applications (WO 2011/115818, WO 2010/077578, WO2010/036698, WO2009/143369, WO 2009/006478, and WO 2007/090071), and U.S. Pat. No. 7,569,686).

[chemical structure]

### Example 2: Preparation of Compound 7

[0746] Compounds 3 (2-acetamido-1,3,4,6-tetra-O-acetyl-2-deoxy-β-Dgalactopyranose or galactosamine pentaacetate) is commercially available. Compound 5 was prepared according to published procedures (Weber et al., J. Med. Chem., 1991, 34, 2692).

[chemical structure]

### Example 3: Preparation of Compound 11

[0747] Compounds 8 and 9 are commercially available.

[chemical structure]

### Example 4: Preparation of Compound 18

[0748] Compound 11 was prepared as per the procedures illustrated in Example 3. Compound 14 is commercially available. Compound 17 was prepared using similar procedures reported by Rensen et al., J. Med. Chem., 2004, 47, 5798-5808.

[chemical structure]

[chemical structure]

### Example 5: Preparation of Compound 23

[0749] Compounds 19 and 21 are commercially available.

[chemical structure]

### Example 6: Preparation of Compound 24

[0750] Compounds 18 and 23 were prepared as per the procedures illustrated in Examples 4 and 5.

[chemical structure]

### Example 7: Preparation of Compound 25

[0751] Compound 24 was prepared as per the procedures illustrated in Example 6.

[chemical structure]

### Example 8: Preparation of Compound 26

[0752] Compound 24 is prepared as per the procedures illustrated in Example 6.

[chemical structure]

### Example 9: General Preparation of Conjugated ASOs Comprising GalNAc₃-1 at the 3′ Terminus, Compound 29

[chemical structure]

[chemical structure]

[chemical structure]

[0754] Wherein the protected GalNAc₃-1 has the structure:

[chemical structure]

[0755] The GalNAc₃ cluster portion of the conjugate group GalNAc₃-1 (GalNAc₃-1ₐ) can be combined with any cleavable moiety to provide a variety of conjugate groups. Wherein GalNAc₃-1ₐ has the formula:

[chemical structure]

[0756] The solid support bound protected GalNAc₃-1, Compound 25, was prepared as per the procedures illustrated in Example 7. Oligomeric Compound 29 comprising GalNAc₃-1 at the 3′ terminus was prepared using standard procedures in automated DNA/RNA synthesis (see Dupouy et al., Angew. Chem. Int. Ed., 2006, 45, 3623-3627). Phosphoramidite building blocks, Compounds 1 and 1a were prepared as per the procedures illustrated in Example 1. The phosphoramidites illustrated are meant to be representative and not intended to be limiting as other phosphoramidite building blocks can be used to prepare oligomeric compounds having a predetermined sequence and composition. The order and quantity of phosphoramidites added to the solid support can be adjusted to prepare gapped oligomeric compounds as described herein. Such gapped oligomeric compounds can have predetermined composition and base sequence as dictated by any given target.

### Example 10: General Preparation Conjugated ASOs Comprising GalNAc₃-1 at the 5′ Terminus, Compound 34

[chemical structure]

[chemical structure]

[0758] The Unylinker™ 30 is commercially available. Oligomeric Compound 34 comprising a GalNAc₃-1 cluster at the 5′ terminus is prepared using standard procedures in automated DNA/RNA synthesis (see Dupouy et al., Angew. Chem. Int. Ed., 2006, 45, 3623-3627). Phosphoramidite building blocks, Compounds 1 and 1a were prepared as per the procedures illustrated in Example 1. The phosphoramidites illustrated are meant to be representative and not intended to be limiting as other phosphoramidite building blocks can be used to prepare an oligomeric compound having a predetermined sequence and composition. The order and quantity of phosphoramidites added to the solid support can be adjusted to prepare gapped oligomeric compounds as described herein. Such gapped oligomeric compounds can have predetermined composition and base sequence as dictated by any given target.

### Example 11: Preparation of Compound 39

[chemical structure]

[chemical structure]

[0760] Compounds 4, 13 and 23 were prepared as per the procedures illustrated in Examples 2, 4, and 5. Compound 35 is prepared using similar procedures published in Rouchaud et al., Eur. J. Org. Chem., 2011, 12, 2346-2353.

### Example 12: Preparation of Compound 40

[0761] Compound 38 is prepared as per the procedures illustrated in Example 11.

[chemical structure]

### Example 13: Preparation of Compound 44

[chemical structure]

[chemical structure]

[0763] Compounds 23 and 36 are prepared as per the procedures illustrated in Examples 5 and 11. Compound 41 is prepared using similar procedures published in WO 2009082607.

### Example 14: Preparation of Compound 45

[0764] Compound 43 is prepared as per the procedures illustrated in Example 13.

[chemical structure]

### Example 15: Preparation of Compound 47

[0765] Compound 46 is commercially available.

[chemical structure]

### Example 16: Preparation of Compound 53

[chemical structure]

[chemical structure]

[0767] Compounds 48 and 49 are commercially available. Compounds 17 and 47 are prepared as per the procedures illustrated in Examples 4 and 15.

### Example 17: Preparation of Compound 54

[chemical structure]

[0769] Compound 53 is prepared as per the procedures illustrated in Example 16.

### Example 18: Preparation of Compound 55

[0770] Compound 53 is prepared as per the procedures illustrated in Example 16.

[chemical structure]

### Example 19: General Method for the Preparation of Conjugated ASOs Comprising GalNAc₃-1 at the 3′ Position Via Solid Phase Techniques (Preparation of ISIS 647535, 647536 and 651900)

[0771] Unless otherwise stated, all reagents and solutions used for the synthesis of oligomeric compounds are purchased from commercial sources. Standard phosphoramidite building blocks and solid support are used for incorporation nucleoside residues which include for example T, A, G, and ^{m}C residues. A 0.1 M solution of phosphoramidite in anhydrous acetonitrile was used for β-D-2′-deoxyribonucleoside and 2′-MOE.

[0772] The ASO syntheses were performed on ABI 394 synthesizer (1-2 μmol scale) or on GE Healthcare Bioscience ÄKTA oligopilot synthesizer (40-200 μmol scale) by the phosphoramidite coupling method on an GalNAc₃-1 loaded VIMAD solid support (110 μmol/g, Guzaev et al., 2003) packed in the column. For the coupling step, the phosphoramidites were delivered 4 fold excess over the loading on the solid support and phosphoramidite condensation was carried out for 10 min. All other steps followed standard protocols supplied by the manufacturer. A solution of 6% dichloroacetic acid in toluene was used for removing dimethoxytrityl (DMT) group from 5′-hydroxyl group of the nucleotide. 4,5-Dicyanoimidazole (0.7 M) in anhydrous CH₃CN was used as activator during coupling step. Phosphorothioate linkages were introduced by sulfurization with 0.1 M solution of xanthane hydride in 1:1 pyridine/CH₃CN for a contact time of 3 minutes. A solution of 20% tert-butylhydroperoxide in CH₃CN containing 6% water was used as an oxidizing agent to provide phosphodiester internucleoside linkages with a contact time of 12 minutes.

[0773] After the desired sequence was assembled, the cyanoethyl phosphate protecting groups were deprotected using a 1:1 (v/v) mixture of triethylamine and acetonitrile with a contact time of 45 minutes. The solid-support bound ASOs were suspended in aqueous ammonia (28-30 wt %) and heated at 55° C. for 6 h.

[0774] The unbound ASOs were then filtered and the ammonia was boiled off. The residue was purified by high pressure liquid chromatography on a strong anion exchange column (GE Healthcare Bioscience, Source 30Q, 30 μm, 2.54×8 cm, A=100 mM ammonium acetate in 30% aqueous CH₃CN, B=1.5 M NaBr in A, 0-40% of B in 60 min, flow 14 mL min-1, =260 nm). The residue was desalted by HPLC on a reverse phase column to yield the desired ASOs in an isolated yield of 15-30% based on the initial loading on the solid support. The ASOs were characterized by ion-pair-HPLC coupled MS analysis with Agilent 1100 MSD system.

[0775] Antisense oligonucleotides not comprising a conjugate were synthesized using standard oligonucleotide synthesis procedures well known in the art.

[0776] Using these methods, three separate antisense compounds targeting ApoC III were prepared. As summarized in Table 17, below, each of the three antisense compounds targeting ApoC III had the same nucleobase sequence; ISIS 304801 is a 5-10-5 MOE gapmer having all phosphorothioate linkages; ISIS 647535 is the same as ISIS 304801, except that it had a GalNAc₃-1 conjugated at its 3′end; and ISIS 647536 is the same as ISIS 647535 except that certain internucleoside linkages of that compound are phosphodiester linkages. As further summarized in Table 17, two separate antisense compounds targeting SRB-1 were synthesized. ISIS 440762 was a 2-10-2 cEt gapmer with all phosphorothioate internucleoside linkages; ISIS 651900 is the same as ISIS 440762, except that it included a GalNAc₃-1 at its 3′-end.

TABLE 17
Modified ASO targeting ApoC III and SRB-1

| | | | | | SEQ |
|---|---|---|---|---|---|
| | | | CalCd | Observed | ID |
| ASO | Sequence (5′ to 3′) | Target | Mass | Mass | No. |
| ISIS | AₑₛGₑₛ^{m}CₑₛTₑₛTₑₛ^{m}C_{ds}T_{ds}T_{ds}G_{ds}T_{ds}^{m}C_{ds}^{m}C_{ds}A_{ds}G_{ds}^{m}C_{ds} TₑₛTₑₛTₑₛAₑₛTₑ | ApoC | 7165.4 | 7164.4 | 2296 |
| 304801 | | III | | | |
| ISIS | AₑₛGₑₛ^{m}CₑₛTₑₛTₑₛ^{m}C_{ds}T_{ds}T_{ds}G_{ds}T_{ds}^{m}C_{ds}^{m}C_{ds}A_{ds}G_{ds}^{m}C_{ds}TₑₛTₑₛTₑₛAₑₛTₑₒA_{do′}- | ApoC | 9239.5 | 9237.8 | 2297 |
| 647535 | GalNAc₃-1ₐ | III | | | |
| ISIS | AₑₛGₑₒ^{m}CₑₒTₑₒTₑₒ^{m}C_{ds}T_{ds}T_{ds}G_{ds}T_{ds}^{m}C_{ds}^{m}C_{ds}A_{ds}G_{ds}^{m}C_{ds}TₑₒTₑₒTₑₛAₑₛTₑₒA_{do′}- | ApoC | 9142.9 | 9140.8 | 2297 |
| 647536 | GalNAc₃-1ₐ | III | | | |
| ISIS | Tₖₛ^{m}CₖₛA_{ds}G_{ds}T_{ds}^{m}C_{ds}A_{ds}T_{ds}G_{ds}A_{ds}^{m}C_{ds}T_{ds}Tₖₛ^{m}Cₖ | SRB-1 | 4647.0 | 4646.4 | 2298 |
| 440762 | | | | | |
| ISIS | Tₖₛ^{m}CₖₛA_{ds}G_{ds}T_{ds}^{m}C_{ds}A_{ds}T_{ds}G_{ds}A_{ds}^{m}C_{ds}T_{ds}Tₖₛ^{m}CₖₒA_{do′}-GalNAc₃-1ₐ | SRB-1 | 6721.1 | 6719.4 | 2299 |
| 651900 | | | | | |

[0777] Subscripts: “e” indicates 2′-MOE modified nucleoside; “d” indicates 13-D-2′-deoxyribonucleoside; “k” indicates 6′-(S)—CH₃ bicyclic nucleoside (e.g. cEt); “s” indicates phosphorothioate internucleoside linkages (PS); “o” indicates phosphodiester internucleoside linkages (PO); and “o′” indicates —O—P(═O)(OH)—. Superscript “m” indicates 5-methylcytosines. “GalNAc₃-1” indicates a conjugate group having the structure shown previously in Example 9. Note that GalNAc₃-1 comprises a cleavable adenosine which links the ASO to remainder of the conjugate, which is designated “GalNAc₃-1ₐ.” This nomenclature is used in the above table to show the full nucleobase sequence, including the adenosine, which is part of the conjugate. Thus, in the above table, the sequences could also be listed as ending with “GalNAc₃-1” with the “A_{do}” omitted. This convention of using the subscript “a” to indicate the portion of a conjugate group lacking a cleavable nucleoside or cleavable moiety is used throughout these Examples. This portion of a conjugate group lacking the cleavable moiety is referred to herein as a “cluster” or “conjugate cluster” or “GalNAc₃ cluster.” In certain instances it is convenient to describe a conjugate group by separately providing its cluster and its cleavable moiety.

### Example 20: Dose-Dependent Antisense Inhibition of Human ApoC III in huApoC III Transgenic Mice

[0778] ISIS 304801 and ISIS 647535, each targeting human ApoC III and described above, were separately tested and evaluated in a dose-dependent study for their ability to inhibit human ApoC III in human ApoC III transgenic mice.

### Treatment

[0779] Human ApoCIII transgenic mice were maintained on a 12-hour light/dark cycle and fed ad libitum Teklad lab chow. Animals were acclimated for at least 7 days in the research facility before initiation of the experiment. ASOs were prepared in PBS and sterilized by filtering through a 0.2 micron filter. ASOs were dissolved in 0.9% PBS for injection.

[0780] Human ApoC III transgenic mice were injected intraperitoneally once a week for two weeks with ISIS 304801 or 647535 at 0.08, 0.25, 0.75, 2.25 or 6.75 μmol/kg, or with PBS as a control. Each treatment group consisted of 4 animals. Forty-eight hours after the administration of the last dose, blood was drawn from each mouse and the mice were sacrificed and tissues were collected.

ApoC III mRNA Analysis

[0781] ApoC III mRNA levels in the mice's livers were determined using real-time PCR and RIBOGREEN® RNA quantification reagent (Molecular Probes, Inc. Eugene, Oreg.) according to standard protocols. ApoC III mRNA levels were determined relative to total RNA (using Ribogreen), prior to normalization to PBS-treated control. The results below are presented as the average percent of ApoC III mRNA levels for each treatment group, normalized to PBS-treated control and are denoted as “% PBS”. The half maximal effective dosage (ED₅₀) of each ASO is also presented in Table 18, below.

[0782] As illustrated, both antisense compounds reduced ApoC III RNA relative to the PBS control. Further, the antisense compound conjugated to GalNAc₃-1 (ISIS 647535) was substantially more potent than the antisense compound lacking the GalNAc₃-1 conjugate (ISIS 304801).

TABLE 18
Effect of ASO treatment on ApoC III mRNA levels
in human ApoC III transgenic mice

| | | | | | Inter- | |
|---|---|---|---|---|---|---|
| | | | | | nucleoside | SEQ |
| | Dose | % | ED₅₀ | | linkage/ | ID |
| ASO | (μmol/kg) | PBS | (μmol/kg) | 3′ Conjugate | Length | No. |
| PBS | 0 | 100 | — | — | — | |
| ISIS | 0.08 | 95 | 0.77 | None | PS/20 | 2296 |
| 304801 | 0.75 | 42 | | | | |
| | 2.25 | 32 | | | | |
| | 6.75 | 19 | | | | |
| ISIS | 0.08 | 50 | 0.074 | GalNAc₃-1 | PS/20 | 2297 |
| 647535 | 0.75 | 15 | | | | |
| | 2.25 | 17 | | | | |
| | 6.75 | 8 | | | | |

### ApoC III Protein Analysis (Turbidometric Assay)

[0783] Plasma ApoC III protein analysis was determined using procedures reported by Graham et al, Circulation Research, published online before print Mar. 29, 2013.

[0784] Approximately 100 μl of plasma isolated from mice was analyzed without dilution using an Olympus Clinical Analyzer and a commercially available turbidometric ApoC III assay (Kamiya, Cat# KAI-006, Kamiya Biomedical, Seattle, Wash.). The assay protocol was performed as described by the vendor.

[0785] As shown in the Table 19 below, both antisense compounds reduced ApoC III protein relative to the PBS control. Further, the antisense compound conjugated to GalNAc₃-1 (ISIS 647535) was substantially more potent than the antisense compound lacking the GalNAc₃-1 conjugate (ISIS 304801).

TABLE 19
Effect of ASO treatment on ApoC III plasma protein levels
in human ApoC III transgenic mice

| | | | | | Inter- | |
|---|---|---|---|---|---|---|
| | | | | | nucleoside | SEQ |
| | Dose | % | ED₅₀ | | Linkage/ | ID |
| ASO | (μmol/kg) | PBS | (μmol/kg) | 3′ Conjugate | Length | No. |
| PBS | 0 | 100 | — | — | — | |
| ISIS | 0.08 | 86 | 0.73 | None | PS/20 | 2296 |
| 304801 | 0.75 | 51 | | | | |
| | 2.25 | 23 | | | | |
| | 6.75 | 13 | | | | |
| ISIS | 0.08 | 72 | 0.19 | GalNAc₃-1 | PS/20 | 2297 |
| 647535 | 0.75 | 14 | | | | |
| | 2.25 | 12 | | | | |
| | 6.75 | 11 | | | | |

[0786] Plasma triglycerides and cholesterol were extracted by the method of Bligh and Dyer (Bligh, E. G. and Dyer, W. J. Can. J. Biochem. Physiol. 37: 911-917, 1959)(Bligh, E and Dyer, W, Can J Biochem Physiol, 37, 911-917, 1959)(Bligh, E and Dyer, W, Can J Biochem Physiol, 37, 911-917, 1959) and measured by using a Beckmann Coulter clinical analyzer and commercially available reagents.

[0787] The triglyceride levels were measured relative to PBS injected mice and are denoted as “% PBS”. Results are presented in Table 20. As illustrated, both antisense compounds lowered triglyceride levels. Further, the antisense compound conjugated to GalNAc₃-1 (ISIS 647535) was substantially more potent than the antisense compound lacking the GalNAc₃-1 conjugate (ISIS 304801).

TABLE 20
Effect of ASO treatment on triglyceride levels in transgenic mice

| | | | | | Inter- | |
|---|---|---|---|---|---|---|
| | | | | | nucleoside | SEQ |
| | Dose | % | ED₅₀ | 3′ | Linkage/ | ID |
| ASO | (μmol/kg) | PBS | (μmol/kg) | Conjugate | Length | No. |
| PBS | 0 | 100 | — | — | — | |
| ISIS | 0.08 | 87 | 0.63 | None | PS/20 | 2296 |
| 304801 | 0.75 | 46 | | | | |
| | 2.25 | 21 | | | | |
| | 6.75 | 12 | | | | |
| ISIS | 0.08 | 65 | 0.13 | GalNAc₃-1 | PS/20 | 2297 |
| 647535 | 0.75 | 9 | | | | |
| | 2.25 | 8 | | | | |
| | 6.75 | 9 | | | | |

[0788] Plasma samples were analyzed by HPLC to determine the amount of total cholesterol and of different fractions of cholesterol (HDL and LDL). Results are presented in Tables 21 and 22. As illustrated, both antisense compounds lowered total cholesterol levels; both lowered LDL; and both raised HDL. Further, the antisense compound conjugated to GalNAc₃-1 (ISIS 647535) was substantially more potent than the antisense compound lacking the GalNAc₃-1 conjugate (ISIS 304801). An increase in HDL and a decrease in LDL levels is a cardiovascular beneficial effect of antisense inhibition of ApoC III.

TABLE 21
Effect of ASO treatment on total cholesterol
levels in transgenic mice

| | | Total Cho- | | | |
|---|---|---|---|---|---|
| | Dose | lesterol | 3′ | Internucleoside | SEQ |
| ASO | (μmol/kg) | (mg/dL) | Conjugate | Linkage/Length | ID No. |
| PBS | 0 | 257 | — | — | |
| ISIS | 0.08 | 226 | None | PS/20 | 2296 |
| 304801 | 0.75 | 164 | | | |
| | 2.25 | 110 | | | |
| | 6.75 | 82 | | | |
| ISIS | 0.08 | 230 | GalNAc₃-1 | PS/20 | 2297 |
| 647535 | 0.75 | 82 | | | |
| | 2.25 | 86 | | | |
| | 6.75 | 99 | | | |

TABLE 22
Effect of ASO treatment on HDL and LDL cholesterol levels
in transgenic mice

| | | | | | Inter- | |
|---|---|---|---|---|---|---|
| | | | | | nucleoside | SEQ |
| | Dose | HDL | LDL | 3′ | Linkage/ | ID |
| ASO | (μmol/kg) | (mg/dL) | (mg/dL) | Conjugate | Length | No. |
| PBS | 0 | 17 | 28 | — | — | |
| ISIS | 0.08 | 17 | 23 | None | PS/20 | 2296 |
| 304801 | 0.75 | 27 | 12 | | | |
| | 2.25 | 50 | 4 | | | |
| | 6.75 | 45 | 2 | | | |
| ISIS | 0.08 | 21 | 21 | GalNAc₃-1 | PS/20 | 2297 |
| 647535 | 0.75 | 44 | 2 | | | |
| | 2.25 | 50 | 2 | | | |
| | 6.75 | 58 | 2 | | | |

### Pharmacokinetics Analysis (PK)

[0789] The PK of the ASOs was also evaluated. Liver and kidney samples were minced and extracted using standard protocols. Samples were analyzed on MSD1 utilizing IP-HPLC-MS. The tissue level (μg/g) of full-length ISIS 304801 and 647535 was measured and the results are provided in Table 23. As illustrated, liver concentrations of total full-length antisense compounds were similar for the two antisense compounds. Thus, even though the GalNAc₃-1-conjugated antisense compound is more active in the liver (as demonstrated by the RNA and protein data above), it is not present at substantially higher concentration in the liver. Indeed, the calculated EC₅₀ (provided in Table 23) confirms that the observed increase in potency of the conjugated compound cannot be entirely attributed to increased accumulation. This result suggests that the conjugate improved potency by a mechanism other than liver accumulation alone, possibly by improving the productive uptake of the antisense compound into cells.

[0790] The results also show that the concentration of GalNAc₃-1 conjugated antisense compound in the kidney is lower than that of antisense compound lacking the GalNAc conjugate. This has several beneficial therapeutic implications. For therapeutic indications where activity in the kidney is not sought, exposure to kidney risks kidney toxicity without corresponding benefit. Moreover, high concentration in kidney typically results in loss of compound to the urine resulting in faster clearance. Accordingly for non-kidney targets, kidney accumulation is undesired. These data suggest that GalNAc₃-1 conjugation reduces kidney accumulation.

TABLE 23
PK analysis of ASO treatment in transgenic mice

| | Dose | Liver | Kidney | Liver EC₅₀ | 3′ | Internucleoside | SEQ |
|---|---|---|---|---|---|---|---|
| ASO | (μmol/kg) | (μg/g) | (μg/g) | (μg/g) | Conjugate | Linkage/Length | ID No. |
| ISIS | 0.1 | 5.2 | 2.1 | 53 | None | PS/20 | 2296 |
| 304801 | 0.8 | 62.8 | 119.6 | | | | |
| | 2.3 | 142.3 | 191.5 | | | | |
| | 6.8 | 202.3 | 337.7 | | | | |
| ISIS | 0.1 | 3.8 | 0.7 | 3.8 | GalNAc₃-1 | PS/20 | 2297 |
| 647535 | 0.8 | 72.7 | 34.3 | | | | |
| | 2.3 | 106.8 | 111.4 | | | | |
| | 6.8 | 237.2 | 179.3 | | | | |

[0791] Metabolites of ISIS 647535 were also identified and their masses were confirmed by high resolution mass spectrometry analysis. The cleavage sites and structures of the observed metabolites are shown below. The relative % of full length ASO was calculated using standard procedures and the results are presented in Table 23a. The major metabolite of ISIS 647535 was full-length ASO lacking the entire conjugate (i.e. ISIS 304801), which results from cleavage at cleavage site A, shown below. Further, additional metabolites resulting from other cleavage sites were also observed. These results suggest that introducing other cleavable bonds such as esters, peptides, disulfides, phosphoramidates or acyl-hydrazones between the GalNAc₃-1 sugar and the ASO, which can be cleaved by enzymes inside the cell, or which may cleave in the reductive environment of the cytosol, or which are labile to the acidic pH inside endosomes and lyzosomes, can also be useful.

TABLE 23a
Observed full length metabolites of ISIS 647535

| | | Cleavage | Relative |
|---|---|---|---|
| Metabolite | ASO | site | % |
| 1 | ISIS 304801 | A | 36.1 |
| 2 | ISIS 304801 + dA | B | 10.5 |
| 3 | ISIS 647535 minus [3 GalNAc] | C | 16.1 |
| 4 | ISIS 647535 minus | D | 17.6 |
| | [3 GalNAc + 1 5-hydroxy-pentanoic | | |
| | acid tether] | | |
| 5 | ISIS 647535 minus | D | 9.9 |
| | [2 GalNAc + 2 5-hydroxy-pentanoic | | |
| | acid tether] | | |
| 6 | ISIS 647535 minus | D | 9.8 |
| | [3 GalNAc + 3 5-hydroxy-pentanoic | | |
| | acid tether] | | |

[chemical structure]

[chemical structure]

### Example 21: Antisense Inhibition of Human ApoC III in Human ApoC III Transgenic Mice in Single Administration Study

[0792] ISIS 304801, 647535 and 647536 each targeting human ApoC III and described in Table 17, were further evaluated in a single administration study for their ability to inhibit human ApoC III in human ApoC III transgenic mice.

### Treatment

[0793] Human ApoCIII transgenic mice were maintained on a 12-hour light/dark cycle and fed ad libitum Teklad lab chow. Animals were acclimated for at least 7 days in the research facility before initiation of the experiment. ASOs were prepared in PBS and sterilized by filtering through a 0.2 micron filter. ASOs were dissolved in 0.9% PBS for injection.

[0794] Human ApoC III transgenic mice were injected intraperitoneally once at the dosage shown below with ISIS 304801, 647535 or 647536 (described above) or with PBS treated control. The treatment group consisted of 3 animals and the control group consisted of 4 animals. Prior to the treatment as well as after the last dose, blood was drawn from each mouse and plasma samples were analyzed. The mice were sacrificed 72 hours following the last administration.

[0795] Samples were collected and analyzed to determine the ApoC III mRNA and protein levels in the liver; plasma triglycerides; and cholesterol, including HDL and LDL fractions were assessed, as described above (Example 20). Data from those analyses are presented in Tables 24-28, below. Liver transaminase levels, alanine aminotransferase (ALT) and aspartate aminotransferase (AST), in serum were measured relative to saline injected mice using standard protocols. The ALT and AST levels showed that the antisense compounds were well tolerated at all administered doses.

[0796] These results show improvement in potency for antisense compounds comprising a GalNAc₃-1 conjugate at the 3′ terminus (ISIS 647535 and 647536) compared to the antisense compound lacking a GalNAc₃-1 conjugate (ISIS 304801). Further, ISIS 647536, which comprises a GalNAc₃-1 conjugate and some phosphodiester linkages was as potent as ISIS 647535, which comprises the same conjugate, and all the internucleoside linkages within the ASO are phosphorothioate.

TABLE 24
Effect of ASO treatment on ApoC III mRNA
levels in human ApoC III transgenic mice

| | | | | | | SEQ |
|---|---|---|---|---|---|---|
| | Dose | % | ED₅₀ | 3′ | Internucleoside | ID |
| ASO | (mg/kg) | PBS | (mg/kg) | Conjugate | linkage/Length | No. |
| PBS | 0 | 99 | — | — | — | |
| ISIS | 1 | 104 | 13.2 | None | PS/20 | 2296 |
| 304801 | 3 | 92 | | | | |
| | 10 | 71 | | | | |
| | 30 | 40 | | | | |
| ISIS | 0.3 | 98 | 1.9 | GalNAc₃-1 | PS/20 | 2297 |
| 647535 | 1 | 70 | | | | |
| | 3 | 33 | | | | |
| | 10 | 20 | | | | |
| ISIS | 0.3 | 103 | 1.7 | GalNAc₃-1 | PS/PO/20 | 2297 |
| 647536 | 1 | 60 | | | | |
| | 3 | 31 | | | | |
| | 10 | 21 | | | | |

TABLE 25
Effect of ASO treatment on ApoC III plasma
protein levels in human ApoC III transgenic mice

| | | | | | | SEQ |
|---|---|---|---|---|---|---|
| | Dose | % | ED₅₀ | 3′ | Internucleoside | ID |
| ASO | (mg/kg) | PBS | (mg/kg) | Conjugate | Linkage/Length | No. |
| PBS | 0 | 99 | — | — | — | |
| ISIS | 1 | 104 | 23.2 | None | PS/20 | 2296 |
| 304801 | 3 | 92 | | | | |
| | 10 | 71 | | | | |
| | 30 | 40 | | | | |
| ISIS | 0.3 | 98 | 2.1 | GalNAc₃-1 | PS/20 | 2297 |
| 647535 | 1 | 70 | | | | |
| | 3 | 33 | | | | |
| | 10 | 20 | | | | |
| ISIS | 0.3 | 103 | 1.8 | GalNAc₃-1 | PS/PO/20 | 2297 |
| 647536 | 1 | 60 | | | | |
| | 3 | 31 | | | | |
| | 10 | 21 | | | | |

TABLE 26
Effect of ASO treatment on triglyceride levels in transgenic mice

| | | | | | | SEQ |
|---|---|---|---|---|---|---|
| | Dose | % | ED₅₀ | | Internucleoside | ID |
| ASO | (mg/kg) | PBS | (mg/kg) | 3′ Conjugate | Linkage/Length | No. |
| PBS | 0 | 98 | — | — | — | |
| ISIS | 1 | 80 | 29.1 | None | PS/20 | 2296 |
| 304801 | 3 | 92 | | | | |
| | 10 | 70 | | | | |
| | 30 | 47 | | | | |
| ISIS | 0.3 | 100 | 2.2 | GalNAc₃-1 | PS/20 | 2297 |
| 647535 | 1 | 70 | | | | |
| | 3 | 34 | | | | |
| | 10 | 23 | | | | |
| ISIS | 0.3 | 95 | 1.9 | GalNAc₃-1 | PS/PO/20 | 2297 |
| 647536 | 1 | 66 | | | | |
| | 3 | 31 | | | | |
| | 10 | 23 | | | | |

TABLE 27
Effect of ASO treatment on total cholesterol
levels in transgenic mice

| | Dose | | 3′ | Internucleoside | SEQ |
|---|---|---|---|---|---|
| ASO | (mg/kg) | % PBS | Conjugate | Linkage/Length | ID No. |
| PBS | 0 | 96 | — | — | |
| ISIS | 1 | 104 | None | PS/20 | 2296 |
| 304801 | 3 | 96 | | | |
| | 10 | 86 | | | |
| | 30 | 72 | | | |
| ISIS | 0.3 | 93 | GalNAc₃-1 | PS/20 | 2297 |
| 647535 | 1 | 85 | | | |
| | 3 | 61 | | | |
| | 10 | 53 | | | |
| ISIS | 0.3 | 115 | GalNAc₃-1 | PS/PO/20 | 2297 |
| 647536 | 1 | 79 | | | |
| | 3 | 51 | | | |
| | 10 | 54 | | | |

TABLE 28
Effect of ASO treatment on HDL and LDL
cholesterol levels in transgenic mice

| | | HDL | | | | SEQ |
|---|---|---|---|---|---|---|
| | Dose | % | LDL | 3′ | Internucleoside | ID |
| ASO | (mg/kg) | PBS | % PBS | Conjugate | Linkage/Length | No. |
| PBS | 0 | 131 | 90 | — | — | |
| ISIS | 1 | 130 | 72 | None | PS/20 | 2296 |
| 304801 | 3 | 186 | 79 | | | |
| | 10 | 226 | 63 | | | |
| | 30 | 240 | 46 | | | |
| ISIS | 0.3 | 98 | 86 | GalNAc₃-1 | PS/20 | 2297 |
| 647535 | 1 | 214 | 67 | | | |
| | 3 | 212 | 39 | | | |
| | 10 | 218 | 35 | | | |
| ISIS | 0.3 | 143 | 89 | GalNAc₃-1 | PS/PO/20 | 2297 |
| 647536 | 1 | 187 | 56 | | | |
| | 3 | 213 | 33 | | | |
| | 10 | 221 | 34 | | | |

[0797] These results confirm that the GalNAc₃-1 conjugate improves potency of an antisense compound. The results also show equal potency of a GalNAc₃-1 conjugated antisense compounds where the antisense oligonucleotides have mixed linkages (ISIS 647536 which has six phosphodiester linkages) and a full phosphorothioate version of the same antisense compound (ISIS 647535).

[0798] Phosphorothioate linkages provide several properties to antisense compounds. For example, they resist nuclease digestion and they bind proteins resulting in accumulation of compound in the liver, rather than in the kidney/urine. These are desirable properties, particularly when treating an indication in the liver. However, phosphorothioate linkages have also been associated with an inflammatory response. Accordingly, reducing the number of phosphorothioate linkages in a compound is expected to reduce the risk of inflammation, but also lower concentration of the compound in liver, increase concentration in the kidney and urine, decrease stability in the presence of nucleases, and lower overall potency. The present results show that a GalNAc₃-1 conjugated antisense compound where certain phosphorothioate linkages have been replaced with phosphodiester linkages is as potent against a target in the liver as a counterpart having full phosphorothioate linkages. Such compounds are expected to be less proinflammatory (See Example 24 describing an experiment showing reduction of PS results in reduced inflammatory effect).

### Example 22: Effect of GalNAc₃-1 Conjugated Modified ASO Targeting SRB-1 In Vivo

[0799] ISIS 440762 and 651900, each targeting SRB-1 and described in Table 17, were evaluated in a dose-dependent study for their ability to inhibit SRB-1 in Balb/c mice.

### Treatment

[0800] Six week old male Balb/c mice (Jackson Laboratory, Bar Harbor, Me.) were injected subcutaneously once at the dosage shown below with ISIS 440762, 651900 or with PBS treated control. Each treatment group consisted of 4 animals. The mice were sacrificed 48 hours following the final administration to determine the SRB-1 mRNA levels in liver using real-time PCR and RIBOGREEN® RNA quantification reagent (Molecular Probes, Inc. Eugene, Oreg.) according to standard protocols. SRB-1 mRNA levels were determined relative to total RNA (using Ribogreen), prior to normalization to PBS-treated control. The results below are presented as the average percent of SRB-1 mRNA levels for each treatment group, normalized to PBS-treated control and is denoted as “% PBS”.

[0801] As illustrated in Table 29, both antisense compounds lowered SRB-1 mRNA levels. Further, the antisense compound comprising the GalNAc₃-1 conjugate (ISIS 651900) was substantially more potent than the antisense compound lacking the GalNAc₃-1 conjugate (ISIS 440762). These results demonstrate that the potency benefit of GalNAc₃-1 conjugates are observed using antisense oligonucleotides complementary to a different target and having different chemically modified nucleosides, in this instance modified nucleosides comprise constrained ethyl sugar moieties (a bicyclic sugar moiety).

TABLE 29
Effect of ASO treatment on SRB-1 mRNA levels in Balb/c mice

| | | Liver | | | | SEQ |
|---|---|---|---|---|---|---|
| | Dose | % | ED₅₀ | | Internucleoside | ID |
| ASO | (mg/kg) | PBS | (mg/kg) | 3′ Conjugate | linkage/Length | No. |
| PBS | 0 | 100 | | — | — | |
| ISIS | 0.7 | 85 | 2.2 | None | PS/14 | 2298 |
| 440762 | 2 | 55 | | | | |
| | 7 | 12 | | | | |
| | 20 | 3 | | | | |
| ISIS | 0.07 | 98 | 0.3 | GalNAc₃-1 | PS/14 | 2299 |
| 651900 | 0.2 | 63 | | | | |
| | 0.7 | 20 | | | | |
| | 2 | 6 | | | | |
| | 7 | 5 | | | | |

### Example 23: Human Peripheral Blood Mononuclear Cells (hPBMC) Assay Protocol

[0802] The hPBMC assay was performed using BD Vautainer CPT tube method. A sample of whole blood from volunteered donors with informed consent at US HealthWorks clinic (Faraday & El Camino Real, Carlsbad) was obtained and collected in 4-15 BD Vacutainer CPT 8 ml tubes (VWR Cat.# BD362753). The approximate starting total whole blood volume in the CPT tubes for each donor was recorded using the PBMC assay data sheet.

[0803] The blood sample was remixed immediately prior to centrifugation by gently inverting tubes 8-10 times. CPT tubes were centrifuged at rt (18-25° C.) in a horizontal (swing-out) rotor for 30 min. at 1500-1800 RCF with brake off (2700 RPM Beckman Allegra 6R). The cells were retrieved from the buffy coat interface (between Ficoll and polymer gel layers); transferred to a sterile 50 ml conical tube and pooled up to 5 CPT tubes/50 ml conical tube/donor. The cells were then washed twice with PBS (Ca⁺⁺, Mg⁺⁺ free; GIBCO). The tubes were topped up to 50 ml and mixed by inverting several times. The sample was then centrifuged at 330×g for 15 minutes at rt (1215 RPM in Beckman Allegra 6R) and aspirated as much supernatant as possible without disturbing pellet. The cell pellet was dislodged by gently swirling tube and resuspended cells in RPMI+10% FBS+pen/strep (˜1 ml/10 ml starting whole blood volume). A 60 μl sample was pipette into a sample vial (Beckman Coulter) with 600 μl VersaLyse reagent (Beckman Coulter Cat# A09777) and was gently vortexed for 10-15 sec. The sample was allowed to incubate for 10 min. at rt and being mixed again before counting. The cell suspension was counted on Vicell XR cell viability analyzer (Beckman Coulter) using PBMC cell type (dilution factor of 1:11 was stored with other parameters). The live cell/ml and viability were recorded. The cell suspension was diluted to 1×10⁷ live PBMC/ml in RPMI+10% FBS+pen/strep.

[0804] The cells were plated at 5×10⁵ in 50 μl/well of 96-well tissue culture plate (Falcon Microtest). 50 μl/well of 2× concentration oligos/controls diluted in RPMI+10% FBS+pen/strep. was added according to experiment template (100 μl/well total). Plates were placed on the shaker and allowed to mix for approx. 1 min. After being incubated for 24 hrs at 37° C.; 5% CO₂, the plates were centrifuged at 400×g for 10 minutes before removing the supernatant for MSD cytokine assay (i.e. human IL-6, IL-10, IL-8 and MCP-1).

### Example 24: Evaluation of Proinflammatory Effects in hPBMC Assay for GalNAc₃-1 Conjugated ASOs

[0805] The antisense oligonucleotides (ASOs) listed in Table 30 were evaluated for proinflammatory effect in hPBMC assay using the protocol described in Example 23. ISIS 353512 is an internal standard known to be a high responder for IL-6 release in the assay. The hPBMCs were isolated from fresh, volunteered donors and were treated with ASOs at 0, 0.0128, 0.064, 0.32, 1.6, 8, 40 and 200 μM concentrations. After a 24 hr treatment, the cytokine levels were measured.

[0806] The levels of IL-6 were used as the primary readout. The EC₅₀ and Eₘₐₓ was calculated using standard procedures. Results are expressed as the average ratio of Eₘₐₓ/EC₅₀ from two donors and is denoted as “Eₘₐₓ/EC₅₀.” The lower ratio indicates a relative decrease in the proinflammatory response and the higher ratio indicates a relative increase in the proinflammatory response.

[0807] With regard to the test compounds, the least proinflammatory compound was the PS/PO linked ASO

[0808] (ISIS 616468). The GalNAc₃-1 conjugated ASO, ISIS 647535 was slightly less proinflammatory than its non-conjugated counterpart ISIS 304801. These results indicate that incorporation of some PO linkages reduces proinflammatory reaction and addition of a GalNAc₃-1 conjugate does not make a compound more proinflammatory and may reduce proinflammatory response. Accordingly, one would expect that an antisense compound comprising both mixed PS/PO linkages and a GalNAc₃-1 conjugate would produce lower proinflammatory responses relative to full PS linked antisense compound with or without a GalNAc₃-1 conjugate. These results show that GalNAc₃1 conjugated antisense compounds, particularly those having reduced PS content are less proinflammatory.

[0809] Together, these results suggest that a GalNAc₃-1 conjugated compound, particularly one with reduced PS content, can be administered at a higher dose than a counterpart full PS antisense compound lacking a GalNAc₃-1 conjugate. Since half-life is not expected to be substantially different for these compounds, such higher administration would result in less frequent dosing. Indeed such administration could be even less frequent, because the GalNAc₃-1 conjugated compounds are more potent (See Examples 20-22) and re-dosing is necessary once the concentration of a compound has dropped below a desired level, where such desired level is based on potency.

TABLE 30
Modified ASOs

| | | | SEQ ID |
|---|---|---|---|
| ASO | Sequence (5′ to 3′) | Target | No. |
| ISIS | Gₑₛ^{m}CₑₛTₑₛGₑₛAₑₛT_{ds}T_{ds}A_{ds}G_{ds}A_{ds}G_{ds} | TNFα | 2300 |
| 104838 | A_{ds}G_{ds}A_{ds}G_{ds}GₑₛTₑₛ^{m}Cₑₛ^{m}Cₑₛ^{m}Cₑ | | |
| ISIS | Tₑₛ^{m}Cₑₛ^{m}Cₑₛ^{m}C_{ds}A_{ds}T_{ds}T_{ds}T_{ds}^{m}C_{ds}A_{ds}G_{ds} | CRP | 2301 |
| 353512 | G_{ds}A_{ds}G_{ds}A_{ds}^{m}C_{ds}^{m}C_{ds}TₑₛGₑₛGₑ | | |
| ISIS | AₑₛGₑₛ^{m}CₑₛTₑₛTₑₛ^{m}C_{ds}T_{ds}T_{ds}G_{ds}T_{ds} | ApoC III | 2296 |
| 304801 | ^{m}C_{ds}^{m}C_{ds}A_{ds}G_{ds}^{m}C_{ds} TₑₛTₑₛTₑₛAₑₛTₑ | | |
| ISIS | AₑₛGₑₛ^{m}CₑₛTₑₛTₑₛ^{m}C_{ds}T_{ds}T_{ds}G_{ds}T_{ds} | ApoC III | 2297 |
| 647535 | ^{m}C_{ds}^{m}C_{ds}A_{ds}G_{ds}^{m}C_{ds}TₑₛTₑₛTₑₛAₑₛTₑₒA_{do′}-GalNAc₃-1ₐ | | |
| ISIS | AₑₛGₑₒ^{m}CₑₒTₑₒTₑₒ^{m}C_{ds}T_{ds}T_{ds}G_{ds}T_{ds} | ApoC III | 2296 |
| 616468 | ^{m}C_{ds}^{m}C_{ds}A_{ds}G_{ds}^{m}C_{ds}TₑₒTₑₒTₑₛAₑₛTₑ | | |

[0810] Subscripts: “e” indicates 2′-MOE modified nucleoside; “d” indicates β-D-2′-deoxyribonucleoside; “k” indicates 6′-(S)—CH₃ bicyclic nucleoside (e.g. cEt); “s” indicates phosphorothioate internucleoside linkages (PS); “o” indicates phosphodiester internucleoside linkages (PO); and “o′” indicates —O—P(═O)(OH)—. Superscript “m” indicates 5-methylcytosines. “A_{do′}-GalNAc₃-1.” indicates a conjugate having the structure GalNAc₃-1 shown in Example 9 attached to the 3′-end of the antisense oligonucleotide, as indicated.

TABLE 31
Proinflammatory Effect of ASOs targeting ApoC III in hPBMC assay

| | EC₅₀ | Eₘₐₓ | | 3′ | Internucleoside | SEQ ID |
|---|---|---|---|---|---|---|
| ASO | (μM) | (μM) | Eₘₐₓ/EC₅₀ | Conjugate | Linkage/Length | No. |
| ISIS 353512 | 0.01 | 265.9 | 26,590 | None | PS/20 | 2301 |
| (high responder) | | | | | | |
| ISIS 304801 | 0.07 | 106.55 | 1,522 | None | PS/20 | 2296 |
| ISIS 647535 | 0.12 | 138 | 1,150 | GalNAc₃-1 | PS/20 | 2297 |
| ISIS 616468 | 0.32 | 71.52 | 224 | None | PS/PO/20 | 2296 |

### Example 25: Effect of GalNAc₃-1 Conjugated Modified ASO Targeting Human ApoC III In Vitro

[0811] ISIS 304801 and 647535 described above were tested in vitro. Primary hepatocyte cells from transgenic mice at a density of 25,000 cells per well were treated with 0.03, 0.08, 0.24, 0.74, 2.22, 6.67 and 20 μM concentrations of modified oligonucleotides. After a treatment period of approximately 16 hours, RNA was isolated from the cells and mRNA levels were measured by quantitative real-time PCR and the hApoC III mRNA levels were adjusted according to total RNA content, as measured by RIBOGREEN.

[0812] The IC₅₀ was calculated using the standard methods and the results are presented in Table 32. As illustrated, comparable potency was observed in cells treated with ISIS 647535 as compared to the control, ISIS 304801.

TABLE 32
Modified ASO targeting human ApoC III in primary hepatocytes

| | IC₅₀ | 3′ | Internucleoside | SEQ |
|---|---|---|---|---|
| ASO | (μM) | Conjugate | linkage/Length | ID No. |
| ISIS | 0.44 | None | PS/20 | 2296 |
| 304801 | | | | |
| ISIS | 0.31 | GalNAc₃-1 | PS/20 | 2297 |
| 647535 | | | | |

[0813] In this experiment, the large potency benefits of GalNAc₃-1 conjugation that are observed in vivo were not observed in vitro. Subsequent free uptake experiments in primary hepatocytes in vitro did show increased potency of oligonucleotides comprising various GalNAc conjugates relative to oligonucleotides that lack the GalNAc conjugate (see Examples 60, 82, and 92).

### Example 26: Effect of PO/PS Linkages on ApoC III ASO Activity

[0814] Human ApoC III transgenic mice were injected intraperitoneally once at 25 mg/kg of ISIS 304801, or ISIS 616468 (both described above) or with PBS treated control once per week for two weeks. The treatment group consisted of 3 animals and the control group consisted of 4 animals. Prior to the treatment as well as after the last dose, blood was drawn from each mouse and plasma samples were analyzed. The mice were sacrificed 72 hours following the last administration.

[0815] Samples were collected and analyzed to determine the ApoC III protein levels in the liver as described above (Example 20). Data from those analyses are presented in Table 33, below.

[0816] These results show reduction in potency for antisense compounds with PO/PS (ISIS 616468) in the wings relative to full PS (ISIS 304801).

TABLE 33
Effect of ASO treatment on ApoC III protein
levels in human ApoC III transgenic mice

| | Dose | | 3′ | Internucleoside | SEQ |
|---|---|---|---|---|---|
| ASO | (mg/kg) | % PBS | Conjugate | linkage/Length | ID No. |
| PBS | 0 | 99 | — | — | |
| ISIS | 25 | | | | |
| 304801 | mg/kg/wk | 24 | None | Full PS | 2296 |
| | for 2 wks | | | | |
| ISIS | 25 | | | | |
| 616468 | mg/kg/wk | 40 | None | 14 PS/6 PO | 2296 |
| | for 2 wks | | | | |

### Example 27: Compound 56

[0817] Compound 56 is commercially available from Glen Research or may be prepared according to published procedures reported by Shchepinov et al., Nucleic Acids Research, 1997, 25(22), 4447-4454.

[chemical structure]

### Example 28: Preparation of Compound 60

[0818] Compound 4 was prepared as per the procedures illustrated in Example 2. Compound 57 is commercially available. Compound 60 was confirmed by structural analysis.

[0819] Compound 57 is meant to be representative and not intended to be limiting as other monoprotected substituted or unsubstituted alkyl diols including but not limited to those presented in the specification herein can be used to prepare phosphoramidites having a predetermined composition.

[chemical structure]

### Example 29: Preparation of Compound 63

[0820] Compounds 61 and 62 are prepared using procedures similar to those reported by Tober et al., Eur. J. Org. Chem., 2013, 3, 566-577; and Jiang et al., Tetrahedron, 2007, 63(19), 3982-3988.

[chemical structure]

[0821] Alternatively, Compound 63 is prepared using procedures similar to those reported in scientific and patent literature by Kim et al., Synlett, 2003, 12, 1838-1840; and Kim et al., published PCT International Application, WO 2004063208.

### Example 30: Preparation of Compound 63b

[0822] Compound 63a is prepared using procedures similar to those reported by Hanessian et al., Canadian Journal of Chemistry, 1996, 74(9), 1731-1737.

[chemical structure]

### Example 31: Preparation of Compound 63d

[0823] Compound 63d is prepared using procedures similar to those reported by Chen et al., Chinese Chemical Letters, 1998, 9(5), 451-453.

[chemical structure]

### Example 32: Preparation of Compound 67

[0824] Compound 64 was prepared as per the procedures illustrated in Example 2. Compound 65 is prepared using procedures similar to those reported by Or et al., published PCT International Application, WO 2009003009. The protecting groups used for Compound 65 are meant to be representative and not intended to be limiting as other protecting groups including but not limited to those presented in the specification herein can be used.

[chemical structure]

### Example 33: Preparation of Compound 70

[0825] Compound 64 was prepared as per the procedures illustrated in Example 2. Compound 68 is commercially available. The protecting group used for Compound 68 is meant to be representative and not intended to be limiting as other protecting groups including but not limited to those presented in the specification herein can be used.

[chemical structure]

### Example 34: Preparation of Compound 75a

[0826] Compound 75 is prepared according to published procedures reported by Shchepinov et al., Nucleic Acids Research, 1997, 25(22), 4447-4454.

[chemical structure]

### Example 35: Preparation of Compound 79

[0827] Compound 76 was prepared according to published procedures reported by Shchepinov et al., Nucleic Acids Research, 1997, 25(22), 4447-4454.

[chemical structure]

### Example 36: Preparation of Compound 79a

[0828] Compound 77 is prepared as per the procedures illustrated in Example 35.

[chemical structure]

### Example 37: General Method for the Preparation of Conjugated Oligomeric Compound 82 Comprising a Phosphodiester Linked GalNAc₃-2 Conjugate at 5′ Terminus Via Solid Support (Method I)

[chemical structure]

[chemical structure]

[0830] The GalNAc₃ cluster portion of the conjugate group GalNAc₃-2 (GalNAc₃-2ₐ) can be combined with any cleavable moiety to provide a variety of conjugate groups. Wherein GalNAc₃-2ₐ has the formula:

[chemical structure]

[0831] The VIMAD-bound oligomeric compound 79b was prepared using standard procedures for automated DNA/RNA synthesis (see Dupouy et al., Angew. Chem. Int. Ed., 2006, 45, 3623-3627). The phosphoramidite Compounds 56 and 60 were prepared as per the procedures illustrated in Examples 27 and 28, respectively. The phosphoramidites illustrated are meant to be representative and not intended to be limiting as other phosphoramidite building blocks including but not limited those presented in the specification herein can be used to prepare an oligomeric compound having a phosphodiester linked conjugate group at the 5′ terminus. The order and quantity of phosphoramidites added to the solid support can be adjusted to prepare the oligomeric compounds as described herein having any predetermined sequence and composition.

### Example 38: Alternative Method for the Preparation of Oligomeric Compound 82 Comprising a Phosphodiester Linked GalNAc₃-2 Conjugate at 5′ Terminus (Method II)

[chemical structure]

[0833] The VIMAD-bound oligomeric compound 79b was prepared using standard procedures for automated DNA/RNA synthesis (see Dupouy et al., Angew. Chem. Int. Ed., 2006, 45, 3623-3627). The GalNAc₃-2 cluster phosphoramidite, Compound 79 was prepared as per the procedures illustrated in Example 35. This alternative method allows a one-step installation of the phosphodiester linked GalNAc₃-2 conjugate to the oligomeric compound at the final step of the synthesis. The phosphoramidites illustrated are meant to be representative and not intended to be limiting, as other phosphoramidite building blocks including but not limited to those presented in the specification herein can be used to prepare oligomeric compounds having a phosphodiester conjugate at the 5′ terminus. The order and quantity of phosphoramidites added to the solid support can be adjusted to prepare the oligomeric compounds as described herein having any predetermined sequence and composition.

### Example 39: General Method for the Preparation of Oligomeric Compound 83h Comprising a GalNAc₃-3 Conjugate at the 5′ Terminus (GalNAc₃-1 Modified for 5′ End Attachment) Via Solid Support

[chemical structure]

[chemical structure]

[0835] Compound 18 was prepared as per the procedures illustrated in Example 4. Compounds 83a and 83b are commercially available. Oligomeric Compound 83e comprising a phosphodiester linked hexylamine was prepared using standard oligonucleotide synthesis procedures. Treatment of the protected oligomeric compound with aqueous ammonia provided the 5′-GalNAc₃-3 conjugated oligomeric compound (83h).

[0836] Wherein GalNAc₃-3 has the structure:

[chemical structure]

[0837] The GalNAc₃ cluster portion of the conjugate group GalNAc₃-3 (GalNAc₃-3ₐ) can be combined with any cleavable moiety to provide a variety of conjugate groups. Wherein GalNAc₃-3ₐ has the formula:

[chemical structure]

### Example 40: General Method for the Preparation of Oligomeric Compound 89 Comprising a Phosphodiester Linked GalNAc₃-4 Conjugate at the 3′ Terminus Via Solid Support

[chemical structure]

[chemical structure]

[chemical structure]

[0839] Wherein GalNAc₃-4 has the structure:

[chemical structure]

[0840] Wherein CM is a cleavable moiety. In certain embodiments, cleavable moiety is:

[chemical structure]

[0841] The GalNAc₃ cluster portion of the conjugate group GalNAc₃-4 (GalNAc₃-4ₐ) can be combined with any cleavable moiety to provide a variety of conjugate groups. Wherein GalNAc₃-4ₐ has the formula:

[chemical structure]

[0842] The protected Unylinker functionalized solid support Compound 30 is commercially available. Compound 84 is prepared using procedures similar to those reported in the literature (see Shchepinov et al., Nucleic Acids Research, 1997, 25(22), 4447-4454; Shchepinov et al., Nucleic Acids Research, 1999, 27, 3035-3041; and Hornet et al., Nucleic Acids Research, 1997, 25, 4842-4849).

[0843] The phosphoramidite building blocks, Compounds 60 and 79a are prepared as per the procedures illustrated in Examples 28 and 36. The phosphoramidites illustrated are meant to be representative and not intended to be limiting as other phosphoramidite building blocks can be used to prepare an oligomeric compound having a phosphodiester linked conjugate at the 3′ terminus with a predetermined sequence and composition. The order and quantity of phosphoramidites added to the solid support can be adjusted to prepare the oligomeric compounds as described herein having any predetermined sequence and composition.

### Example 41: General Method for the Preparation of ASOs Comprising a Phosphodiester Linked GalNAc₃-2 (See Example 37, Bx is Adenine) Conjugate at the 5′ Position Via Solid Phase Techniques (Preparation of ISIS 661134)

[0844] Unless otherwise stated, all reagents and solutions used for the synthesis of oligomeric compounds are purchased from commercial sources. Standard phosphoramidite building blocks and solid support are used for incorporation nucleoside residues which include for example T, A, G, and ^{m}C residues. Phosphoramidite compounds 56 and 60 were used to synthesize the phosphodiester linked GalNAc₃-2 conjugate at the 5′ terminus. A 0.1 M solution of phosphoramidite in anhydrous acetonitrile was used for β-D-2′-deoxyribonucleoside and 2′-MOE.

[0845] The ASO syntheses were performed on ABI 394 synthesizer (1-2 μmol scale) or on GE Healthcare Bioscience ÄKTA oligopilot synthesizer (40-200 μmol scale) by the phosphoramidite coupling method on VIMAD solid support (110 μmol/g, Guzaev et al., 2003) packed in the column. For the coupling step, the phosphoramidites were delivered at a 4 fold excess over the initial loading of the solid support and phosphoramidite coupling was carried out for 10 min. All other steps followed standard protocols supplied by the manufacturer. A solution of 6% dichloroacetic acid in toluene was used for removing the dimethoxytrityl (DMT) groups from 5′-hydroxyl groups of the nucleotide. 4,5-Dicyanoimidazole (0.7 M) in anhydrous CH₃CN was used as activator during the coupling step. Phosphorothioate linkages were introduced by sulfurization with 0.1 M solution of xanthane hydride in 1:1 pyridine/CH₃CN for a contact time of 3 minutes. A solution of 20% tert-butylhydroperoxide in CH₃CN containing 6% water was used as an oxidizing agent to provide phosphodiester internucleoside linkages with a contact time of 12 minutes.

[0846] After the desired sequence was assembled, the cyanoethyl phosphate protecting groups were deprotected using a 20% diethylamine in toluene (v/v) with a contact time of 45 minutes. The solid-support bound ASOs were suspended in aqueous ammonia (28-30 wt %) and heated at 55° C. for 6 h.

[0847] The unbound ASOs were then filtered and the ammonia was boiled off. The residue was purified by high pressure liquid chromatography on a strong anion exchange column (GE Healthcare Bioscience, Source 30Q, 30 μm, 2.54×8 cm, A=100 mM ammonium acetate in 30% aqueous CH₃CN, B=1.5 M NaBr in A, 0-40% of B in 60 min, flow 14 mL min-1, λ=260 nm). The residue was desalted by HPLC on a reverse phase column to yield the desired ASOs in an isolated yield of 15-30% based on the initial loading on the solid support. The ASOs were characterized by ion-pair-HPLC coupled MS analysis with Agilent 1100 MSD system.

TABLE 34
ASO comprising a phosphodiester linked GalNAc₃-2 conjugate
at the 5′ position targeting SRB-1

| | | | Observed | SEQ ID |
|---|---|---|---|---|
| ISIS No. | Sequence (5′ to 3′) | CalCd Mass | Mass | No. |
| 661134 | GalNAc₃-2ₐ-_{o′}A_{do}Tₖₛ^{m}CₖₛA_{ds}G_{ds}T_{ds}^{m}C_{ds}A_{ds}T_{ds} | 6482.2 | 6481.6 | 2302 |
| | G_{ds}A_{ds}^{m}C_{ds}T_{ds}Tₖₛ^{m}Cₖ | | | |

[0848] Subscripts: “e” indicates 2′-MOE modified nucleoside; “d” indicates 13-D-2′-deoxyribonucleoside; “k” indicates 6′-(S)—CH₃ bicyclic nucleoside (e.g. cEt); “s” indicates phosphorothioate internucleoside linkages (PS); “o” indicates phosphodiester internucleoside linkages (PO); and “o′” indicates —O—P(═O)(OH)—. Superscript “m” indicates 5-methylcytosines. The structure of GalNAc₃-2ₐ is shown in Example 37.

### Example 42: General Method for the Preparation of ASOs Comprising a GalNAc₃-3 Conjugate at the 5′ Position Via Solid Phase Techniques (Preparation of ISIS 661166)

[0849] The synthesis for ISIS 661166 was performed using similar procedures as illustrated in Examples 39 and 41.

[0850] ISIS 661166 is a 5-10-5 MOE gapmer, wherein the 5′ position comprises a GalNAc₃-3 conjugate. The ASO was characterized by ion-pair-HPLC coupled MS analysis with Agilent 1100 MSD system.

TABLE 34a
ASO comprising a GalNAc₃-3 conjugate at the 5′ position via a hexylamino
ester linkage targeting Malat-1

| ISIS | | | Calcd | Observed | |
|---|---|---|---|---|---|
| No. | Sequence (5′ to 3′) | Conjugate | Mass | Mass | SEQ ID No. |
| 661166 | 5′-GalNAc₃-3_{a-o′}^{m}CₑₛGₑₛGₑₛTₑₛGₑₛ | 5′-GalNAc₃-3 | 8992.16 | 8990.51 | 2303 |
| | ^{m}C_{ds}A_{ds}A_{ds}G_{ds}G_{ds}^{m}C_{ds}T_{ds}T_{ds}A_{ds}G_{ds} | | | | |
| | GₑₛAₑₛAₑₛTₑₛTₑ | | | | |

[0851] Subscripts: “e” indicates 2′-MOE modified nucleoside; “d” indicates β-D-2′-deoxyribonucleoside; “s” indicates phosphorothioate internucleoside linkages (PS); “o” indicates phosphodiester internucleoside linkages (PO); and “o′” indicates —O—P(═O)(OH)—. Superscript “m” indicates 5-methylcytosines. The structure of “5′-GalNAc₃-3a” is shown in Example 39.

### Example 43: Dose-Dependent Study of Phosphodiester Linked GalNAc₃-2 (See Examples 37 and 41, Bx is Adenine) at the 5′ Terminus Targeting SRB-1 In Vivo

[0852] ISIS 661134 (see Example 41) comprising a phosphodiester linked GalNAc₃-2 conjugate at the 5′ terminus was tested in a dose-dependent study for antisense inhibition of SRB-1 in mice. Unconjugated ISIS 440762 and 651900 (GalNAc₃-1 conjugate at 3′ terminus, see Example 9) were included in the study for comparison and are described previously in Table 17.

### Treatment

[0853] Six week old male Balb/c mice (Jackson Laboratory, Bar Harbor, Me.) were injected subcutaneously once at the dosage shown below with ISIS 440762, 651900, 661134 or with PBS treated control. Each treatment group consisted of 4 animals. The mice were sacrificed 72 hours following the final administration to determine the liver SRB-1 mRNA levels using real-time PCR and RIBOGREEN® RNA quantification reagent (Molecular Probes, Inc. Eugene, Oreg.) according to standard protocols. SRB-1 mRNA levels were determined relative to total RNA (using Ribogreen), prior to normalization to PBS-treated control. The results below are presented as the average percent of SRB-1 mRNA levels for each treatment group, normalized to PBS-treated control and is denoted as “% PBS”. The ED₅₀s were measured using similar methods as described previously and are presented below.

[0854] As illustrated in Table 35, treatment with antisense oligonucleotides lowered SRB-1 mRNA levels in a dose-dependent manner Indeed, the antisense oligonucleotides comprising the phosphodiester linked GalNAc₃-2 conjugate at the 5′ terminus (ISIS 661134) or the GalNAc₃-1 conjugate linked at the 3′ terminus (ISIS 651900) showed substantial improvement in potency compared to the unconjugated antisense oligonucleotide (ISIS 440762). Further, ISIS 661134, which comprises the phosphodiester linked GalNAc₃-2 conjugate at the 5′ terminus was equipotent compared to ISIS 651900, which comprises the GalNAc₃-1 conjugate at the 3′ terminus.

TABLE 35
ASOs containing GalNAc₃-1 or GalNAc₃-2 targeting SRB-1

| ISIS | Dosage | SRB-1 mRNA | ED₅₀ | | SEQ |
|---|---|---|---|---|---|
| No. | (mg/kg) | levels (% PBS) | (mg/kg) | Conjugate | ID No. |
| PBS | 0 | 100 | — | — | |
| 440762 | 0.2 | 116 | 2.58 | No conjugate | 2298 |
| | 0.7 | 91 | | | |
| | 2 | 69 | | | |
| | 7 | 22 | | | |
| | 20 | 5 | | | |
| 651900 | 0.07 | 95 | 0.26 | 3′ GalNAc₃-1 | 2299 |
| | 0.2 | 77 | | | |
| | 0.7 | 28 | | | |
| | 2 | 11 | | | |
| | 7 | 8 | | | |
| 661134 | 0.07 | 107 | 0.25 | 5′ GalNAc₃-2 | 2302 |
| | 0.2 | 86 | | | |
| | 0.7 | 28 | | | |
| | 2 | 10 | | | |
| | 7 | 6 | | | |

[0855] Structures for 3′ GalNAc₃-1 and 5′ GalNAc₃-2 were described previously in Examples 9 and 37.

### Pharmacokinetics Analysis (PK)

[0856] The PK of the ASOs from the high dose group (7 mg/kg) was examined and evaluated in the same manner as illustrated in Example 20. Liver sample was minced and extracted using standard protocols. The full length metabolites of 661134 (5′ GalNAc₃-2) and ISIS 651900 (3′ GalNAc₃-1) were identified and their masses were confirmed by high resolution mass spectrometry analysis. The results showed that the major metabolite detected for the ASO comprising a phosphodiester linked GalNAc₃-2 conjugate at the 5′ terminus (ISIS 661134) was ISIS 440762 (data not shown). No additional metabolites, at a detectable level, were observed. Unlike its counterpart, additional metabolites similar to those reported previously in Table 23a were observed for the ASO having the GalNAc₃-1 conjugate at the 3′ terminus (ISIS 651900). These results suggest that having the phosphodiester linked GalNAc₃-1 or GalNAc₃-2 conjugate may improve the PK profile of ASOs without compromising their potency.

### Example 44: Effect of PO/PS Linkages on Antisense Inhibition of ASOs Comprising GalNAc₃-1 Conjugate (See Example 9) at the 3′ Terminus Targeting SRB-1

[0857] ISIS 655861 and 655862 comprising a GalNAc₃-1 conjugate at the 3′ terminus each targeting SRB-1 were tested in a single administration study for their ability to inhibit SRB-1 in mice. The parent unconjugated compound, ISIS 353382 was included in the study for comparison.

[0858] The ASOs are 5-10-5 MOE gapmers, wherein the gap region comprises ten 2′-deoxyribonucleosides and each wing region comprises five 2′-MOE modified nucleosides. The ASOs were prepared using similar methods as illustrated previously in Example 19 and are described Table 36, below.

TABLE 36
Modified ASOs comprising GalNAc₃-1 conjugate at the
3′ terminus targeting SRB-1

| | | | SEQ ID |
|---|---|---|---|
| ISIS No. | Sequence (5′ to 3′) | Chemistry | No. |
| 353382 | Gₑₛ^{m}CₑₛTₑₛTₑₛ^{m}CₑₛA_{ds}G_{ds}T_{ds}^{m}C_{ds}A_{ds}T_{ds}G_{ds}A_{ds} | Full PS no conjugate | 2304 |
| (parent) | ^{m}C_{ds}T_{ds}Tₑₛ^{m}Cₑₛ^{m}CₑₛTₑₛTₑ | | |
| 655861 | Gₑₛ^{m}CₑₛTₑₛTₑₛ^{m}CₑₛA_{ds}G_{ds}T_{ds}^{m}C_{ds}A_{ds}T_{ds}G_{ds}A_{ds} | Full PS with | 2305 |
| | ^{m}C_{ds}T_{ds}Tₑₛ^{m}Cₑₛ^{m}CₑₛTₑₛTₑₒA_{do′}-GalNAc₃-1ₐ | GalNAc₃-1 conjugate | |
| 655862 | Gₑₛ^{m}CₑₒTₑₒTₑₒ^{m}CₑₒA_{ds}G_{ds}T_{ds}^{m}C_{ds}A_{ds}T_{ds}G_{ds}A_{ds} | Mixed PS/PO with | 2305 |
| | ^{m}C_{ds}T_{ds}Tₑₒ^{m}Cₑₒ^{m}CₑₛTₑₛTₑₒA_{do′}-GalNAc₃-1ₐ | GalNAc₃-1 conjugate | |

[0859] Subscripts: “e” indicates 2′-MOE modified nucleoside; “d” indicates β-D-2′-deoxyribonucleoside; “s” indicates phosphorothioate internucleoside linkages (PS); “o” indicates phosphodiester internucleoside linkages (PO); and “o′” indicates —O—P(═O)(OH)—. Superscript “m” indicates 5-methylcytosines. The structure of “GalNAc₃-1” is shown in Example 9.

### Treatment

[0860] Six week old male Balb/c mice (Jackson Laboratory, Bar Harbor, Me.) were injected subcutaneously once at the dosage shown below with ISIS 353382, 655861, 655862 or with PBS treated control. Each treatment group consisted of 4 animals. Prior to the treatment as well as after the last dose, blood was drawn from each mouse and plasma samples were analyzed. The mice were sacrificed 72 hours following the final administration to determine the liver SRB-1 mRNA levels using real-time PCR and RIBOGREEN® RNA quantification reagent (Molecular Probes, Inc. Eugene, Oreg.) according to standard protocols. SRB-1 mRNA levels were determined relative to total RNA (using Ribogreen), prior to normalization to PBS-treated control. The results below are presented as the average percent of SRB-1 mRNA levels for each treatment group, normalized to PBS-treated control and is denoted as “% PBS”. The ED₅₀s were measured using similar methods as described previously and are reported below.

[0861] As illustrated in Table 37, treatment with antisense oligonucleotides lowered SRB-1 mRNA levels in a dose-dependent manner compared to PBS treated control. Indeed, the antisense oligonucleotides comprising the GalNAc₃-1 conjugate at the 3′ terminus (ISIS 655861 and 655862) showed substantial improvement in potency comparing to the unconjugated antisense oligonucleotide (ISIS 353382). Further, ISIS 655862 with mixed PS/PO linkages showed an improvement in potency relative to full PS (ISIS 655861).

TABLE 37
Effect of PO/PS linkages on antisense inhibition of ASOs comprising
GalNAc₃-1 conjugate at 3′ terminus targeting SRB-1

| ISIS | Dosage | SRB-1 mRNA | ED₅₀ | | SEQ |
|---|---|---|---|---|---|
| No. | (mg/kg) | levels (% PBS) | (mg/kg) | Chemistry | ID No. |
| PBS | 0 | 100 | — | — | |
| 353382 | 3 | 76.65 | 10.4 | Full PS | 2304 |
| (parent) | 10 | 52.40 | | without | |
| | 30 | 24.95 | | conjugate | |
| 655861 | 0.5 | 81.22 | 2.2 | Full PS | 2305 |
| | 1.5 | 63.51 | | with | |
| | 5 | 24.61 | | GalNAc₃-1 | |
| | 15 | 14.80 | | conjugate | |
| 655862 | 0.5 | 69.57 | 1.3 | Mixed PS/PO | 2305 |
| | 1.5 | 45.78 | | with | |
| | 5 | 19.70 | | GalNAc₃-1 | |
| | 15 | 12.90 | | conjugate | |

[0862] Liver transaminase levels, alanine aminotransferase (ALT) and aspartate aminotransferase (AST), in serum were measured relative to saline injected mice using standard protocols. Organ weights were also evaluated. The results demonstrated that no elevation in transaminase levels (Table 38) or organ weights (data not shown) were observed in mice treated with ASOs compared to PBS control. Further, the ASO with mixed PS/PO linkages (ISIS 655862) showed similar transaminase levels compared to full PS (ISIS 655861).

TABLE 38
Effect of PO/PS linkages on transaminase levels of ASOs
comprising GalNAc₃-1 conjugate at 3' terminus targeting SRB-1

| ISIS | Dosage | ALT | AST | | SEQ |
|---|---|---|---|---|---|
| No. | (mg/kg) | (U/L) | (U/L) | Chemistry | ID No. |
| PBS | 0 | 28.5 | 65 | — | |
| 353382 | 3 | 50.25 | 89 | Full PS without | 2304 |
| (parent) | 10 | 27.5 | 79.3 | conjugate | |
| | 30 | 27.3 | 97 | | |
| 655861 | 0.5 | 28 | 55.7 | Full PS with | 2305 |
| | 1.5 | 30 | 78 | GalNAc₃-1 | |
| | 5 | 29 | 63.5 | | |
| | 15 | 28.8 | 67.8 | | |
| 655862 | 0.5 | 50 | 75.5 | Mixed PS/PO with | 2305 |
| | 1.5 | 21.7 | 58.5 | GalNAc₃-1 | |
| | 5 | 29.3 | 69 | | |
| | 15 | 22 | 61 | | |

### Example 45: Preparation of PFP Ester, Compound 110a

[chemical structure]

[chemical structure]

[chemical structure]

[0864] Compound 4 (9.5 g, 28.8 mmoles) was treated with compound 103a or 103b (38 mmoles), individually, and TMSOTf (0.5 eq.) and molecular sieves in dichloromethane (200 mL), and stirred for 16 hours at room temperature. At that time, the organic layer was filtered thru celite, then washed with sodium bicarbonate, water and brine. The organic layer was then separated and dried over sodium sulfate, filtered and reduced under reduced pressure. The resultant oil was purified by silica gel chromatography (2%->10% methanol/dichloromethane) to give compounds 104a and 104b in >80% yield. LCMS and proton NMR was consistent with the structure.

[0865] Compounds 104a and 104b were treated to the same conditions as for compounds 100a-d (Example 47), to give compounds 105a and 105b in >90% yield. LCMS and proton NMR was consistent with the structure.

[0866] Compounds 105a and 105b were treated, individually, with compound 90 under the same conditions as for compounds 901a-d, to give compounds 106a (80%) and 106b (20%). LCMS and proton NMR was consistent with the structure.

[0867] Compounds 106a and 106b were treated to the same conditions as for compounds 96a-d (Example 47), to give 107a (60%) and 107b (20%). LCMS and proton NMR was consistent with the structure.

[0868] Compounds 107a and 107b were treated to the same conditions as for compounds 97a-d (Example 47), to give compounds 108a and 108b in 40-60% yield. LCMS and proton NMR was consistent with the structure.

[0869] Compounds 108a (60%) and 108b (40%) were treated to the same conditions as for compounds 100a-d (Example 47), to give compounds 109a and 109b in >80% yields. LCMS and proton NMR was consistent with the structure.

[0870] Compound 109a was treated to the same conditions as for compounds 101a-d (Example 47), to give Compound 110a in 30-60% yield. LCMS and proton NMR was consistent with the structure. Alternatively, Compound 110b can be prepared in a similar manner starting with Compound 109b.

### Example 46: General Procedure for Conjugation with PFP Esters (Oligonucleotide 111); Preparation of ISIS 666881 (GalNAc₃-10)

[0871] A 5′-hexylamino modified oligonucleotide was synthesized and purified using standard solid-phase oligonucleotide procedures. The 5′-hexylamino modified oligonucleotide was dissolved in 0.1 M sodium tetraborate, pH 8.5 (200 μL) and 3 equivalents of a selected PFP esterified GalNAc₃ cluster dissolved in DMSO (50 μL) was added. If the PFP ester precipitated upon addition to the ASO solution DMSO was added until all PFP ester was in solution. The reaction was complete after about 16 h of mixing at room temperature. The resulting solution was diluted with water to 12 mL and then spun down at 3000 rpm in a spin filter with a mass cut off of 3000 Da. This process was repeated twice to remove small molecule impurities. The solution was then lyophilized to dryness and redissolved in concentrated aqueous ammonia and mixed at room temperature for 2.5 h followed by concentration in vacuo to remove most of the ammonia. The conjugated oligonucleotide was purified and desalted by RP-HPLC and lyophilized to provide the GalNAc₃ conjugated oligonucleotide.

[chemical structure]

[0872] Oligonucleotide 111 is conjugated with GalNAc₃-10. The GalNAc₃ cluster portion of the conjugate group GalNAc₃-10 (GalNAc₃-10ₐ) can be combined with any cleavable moiety to provide a variety of conjugate groups. In certain embodiments, the cleavable moiety is —P(═O)(OH)-A_{d}-P(═O)(OH)— as shown in the oligonucleotide (ISIS 666881) synthesized with GalNAc₃-10 below. The structure of GalNAc₃-10 (GalNAc₃-10ₐ-CM-) is shown below:

[chemical structure]

[0873] Following this general procedure ISIS 666881 was prepared. 5′-hexylamino modified oligonucleotide, ISIS 660254, was synthesized and purified using standard solid-phase oligonucleotide procedures. ISIS 660254 (40 mg, 5.2 μmol) was dissolved in 0.1 M sodium tetraborate, pH 8.5 (200 μL) and 3 equivalents PFP ester (Compound 110a) dissolved in DMSO (50 μL) was added. The PFP ester precipitated upon addition to the ASO solution requiring additional DMSO (600 μL) to fully dissolve the PFP ester. The reaction was complete after 16 h of mixing at room temperature. The solution was diluted with water to 12 mL total volume and spun down at 3000 rpm in a spin filter with a mass cut off of 3000 Da. This process was repeated twice to remove small molecule impurities. The solution was lyophilized to dryness and redissolved in concentrated aqueous ammonia with mixing at room temperature for 2.5 h followed by concentration in vacuo to remove most of the ammonia. The conjugated oligonucleotide was purified and desalted by RP-HPLC and lyophilized to give ISIS 666881 in 90% yield by weight (42 mg, 4.7 μmol).

TABLE 38a
GalNAc₃-10 conjugated oligonucleotide

| | | | SEQ |
|---|---|---|---|
| ASO | Sequence (5′ to 3′) | 5′ group | ID No. |
| ISIS 660254 | NH₂(CH₂)₆-ₒA_{do}Gₑₛ^{m}CₑₛTₑₛTₑₛ^{m}CₑₛA_{ds}G_{ds}T_{ds} | Hexylamine | 2306 |
| | ^{m}C_{ds}A_{ds}T_{ds}G_{ds}A_{ds}^{m}C_{ds}T_{ds}Tₑₛ^{m}Cₑₛ^{m}CₑₛTₑₛTₑ | | |
| ISIS 666881 | GalNAc₃-10ₐ-_{o′}A_{do}Gₑₛ^{m}CₑₛTₑₛTₑₛ^{m}CₑₛA_{ds}G_{ds}T_{ds} | GalNAc₃-10 | 2306 |
| | ^{m}C_{ds}A_{ds}T_{ds}G_{ds}A_{ds}^{m}C_{ds}T_{ds}Tₑₛ^{m}Cₑₛ^{m}CₑₛTₑₛTₑ | | |

[0874] Capital letters indicate the nucleobase for each nucleoside and ^{m}C indicates a 5-methyl cytosine. Subscripts: “e” indicates a 2′-MOE modified nucleoside; “d” indicates a β-D-2′-deoxyribonucleoside; “s” indicates a phosphorothioate internucleoside linkage (PS); “o” indicates a phosphodiester internucleoside linkage (PO); and “o′” indicates —O—P(═O)(OH)—. Conjugate groups are in bold.

### Example 47: Preparation of Oligonucleotide 102 Comprising GalNAc₃-8

[chemical structure]

[chemical structure]

[0876] The triacid 90 (4 g, 14.43 mmol) was dissolved in DMF (120 mL) and N,N-Diisopropylethylamine (12.35 mL, 72 mmoles). Pentafluorophenyl trifluoroacetate (8.9 mL, 52 mmoles) was added dropwise, under argon, and the reaction was allowed to stir at room temperature for 30 minutes. Boc-diamine 91a or 91b (68.87 mmol) was added, along with N,N-Diisopropylethylamine (12.35 mL, 72 mmoles), and the reaction was allowed to stir at room temperature for 16 hours. At that time, the DMF was reduced by >75% under reduced pressure, and then the mixture was dissolved in dichloromethane. The organic layer was washed with sodium bicarbonate, water and brine. The organic layer was then separated and dried over sodium sulfate, filtered and reduced to an oil under reduced pressure. The resultant oil was purified by silica gel chromatography (2%->10% methanol/dichloromethane) to give compounds 92a and 92b in an approximate 80% yield. LCMS and proton NMR were consistent with the structure.

[0877] Compound 92a or 92b (6.7 mmoles) was treated with 20 mL of dichloromethane and 20 mL of trifluoroacetic acid at room temperature for 16 hours. The resultant solution was evaporated and then dissolved in methanol and treated with DOWEX-OH resin for 30 minutes. The resultant solution was filtered and reduced to an oil under reduced pressure to give 85-90% yield of compounds 93a and 93b.

[0878] Compounds 7 or 64 (9.6 mmoles) were treated with HBTU (3.7 g, 9.6 mmoles) and N,N-Diisopropylethylamine (5 mL) in DMF (20 mL) for 15 minutes. To this was added either compounds 93a or 93b (3 mmoles), and allowed to stir at room temperature for 16 hours. At that time, the DMF was reduced by >75% under reduced pressure, and then the mixture was dissolved in dichloromethane. The organic layer was washed with sodium bicarbonate, water and brine. The organic layer was then separated and dried over sodium sulfate, filtered and reduced to an oil under reduced pressure. The resultant oil was purified by silica gel chromatography (5%->20% methanol/dichloromethane) to give compounds 96a-d in 20-40% yield. LCMS and proton NMR was consistent with the structure.

[0879] Compounds 96a-d (0.75 mmoles), individually, were hydrogenated over Raney Nickel for 3 hours in Ethanol (75 mL). At that time, the catalyst was removed by filtration thru celite, and the ethanol removed under reduced pressure to give compounds 97a-d in 80-90% yield. LCMS and proton NMR were consistent with the structure.

[0880] Compound 23 (0.32 g, 0.53 mmoles) was treated with HBTU (0.2 g, 0.53 mmoles) and N,N-Diisopropylethylamine (0.19 mL, 1.14 mmoles) in DMF (30 mL) for 15 minutes. To this was added compounds 97a-d (0.38 mmoles), individually, and allowed to stir at room temperature for 16 hours. At that time, the DMF was reduced by >75% under reduced pressure, and then the mixture was dissolved in dichloromethane. The organic layer was washed with sodium bicarbonate, water and brine. The organic layer was then separated and dried over sodium sulfate, filtered and reduced to an oil under reduced pressure. The resultant oil was purified by silica gel chromatography (2%->20% methanol/dichloromethane) to give compounds 98a-d in 30-40% yield. LCMS and proton NMR was consistent with the structure.

[0881] Compound 99 (0.17 g, 0.76 mmoles) was treated with HBTU (0.29 g, 0.76 mmoles) and N,N-Diisopropylethylamine (0.35 mL, 2.0 mmoles) in DMF (50 mL) for 15 minutes. To this was added compounds 97a-d (0.51 mmoles), individually, and allowed to stir at room temperature for 16 hours. At that time, the DMF was reduced by >75% under reduced pressure, and then the mixture was dissolved in dichloromethane. The organic layer was washed with sodium bicarbonate, water and brine. The organic layer was then separated and dried over sodium sulfate, filtered and reduced to an oil under reduced pressure. The resultant oil was purified by silica gel chromatography (5%->20% methanol/dichloromethane) to give compounds 100a-d in 40-60% yield. LCMS and proton NMR was consistent with the structure.

[0882] Compounds 100a-d (0.16 mmoles), individually, were hydrogenated over 10% Pd(OH)₂/C for 3 hours in methanol/ethyl acetate (1:1, 50 mL). At that time, the catalyst was removed by filtration thru celite, and the organics removed under reduced pressure to give compounds 101a-d in 80-90% yield. LCMS and proton NMR was consistent with the structure.

[0883] Compounds 101a-d (0.15 mmoles), individually, were dissolved in DMF (15 mL) and pyridine (0.016 mL, 0.2 mmoles). Pentafluorophenyl trifluoroacetate (0.034 mL, 0.2 mmoles) was added dropwise, under argon, and the reaction was allowed to stir at room temperature for 30 minutes. At that time, the DMF was reduced by >75% under reduced pressure, and then the mixture was dissolved in dichloromethane. The organic layer was washed with sodium bicarbonate, water and brine. The organic layer was then separated and dried over sodium sulfate, filtered and reduced to an oil under reduced pressure. The resultant oil was purified by silica gel chromatography (2%->5% methanol/dichloromethane) to give compounds 102a-d in an approximate 80% yield. LCMS and proton NMR were consistent with the structure.

[chemical structure]

[0884] Oligomeric Compound 102, comprising a GalNAc₃-8 conjugate group, was prepared using the general procedures illustrated in Example 46. The GalNAc₃ cluster portion of the conjugate group GalNAc₃-8 (GalNAc₃-8ₐ) can be combined with any cleavable moiety to provide a variety of conjugate groups. In a preferred embodiment, the cleavable moiety is —P(═O)(OH)-A_{d}-P(═O)(OH)—.

[0885] The structure of GalNAc₃-8 (GalNAc₃-8ₐ-CM-) is shown below:

[chemical structure]

### Example 48: Preparation of Oligonucleotide 119 Comprising GalNAc₃-7

[chemical structure]

[chemical structure]

[0887] Compound 112 was synthesized following the procedure described in the literature (J. Med. Chem. 2004, 47, 5798-5808).

[0888] Compound 112 (5 g, 8.6 mmol) was dissolved in 1:1 methanol/ethyl acetate (22 mL/22 mL). Palladium hydroxide on carbon (0.5 g) was added. The reaction mixture was stirred at room temperature under hydrogen for 12 h. The reaction mixture was filtered through a pad of celite and washed the pad with 1:1 methanol/ethyl acetate. The filtrate and the washings were combined and concentrated to dryness to yield Compound 105a (quantitative). The structure was confirmed by LCMS.

[0889] Compound 113 (1.25 g, 2.7 mmol), HBTU (3.2 g, 8.4 mmol) and DIEA (2.8 mL, 16.2 mmol) were dissolved in anhydrous DMF (17 mL) and the reaction mixture was stirred at room temperature for 5 min. To this a solution of Compound 105a (3.77 g, 8.4 mmol) in anhydrous DMF (20 mL) was added. The reaction was stirred at room temperature for 6 h. Solvent was removed under reduced pressure to get an oil. The residue was dissolved in CH₂Cl₂ (100 mL) and washed with aqueous saturated NaHCO₃ solution (100 mL) and brine (100 mL). The organic phase was separated, dried (Na₂SO₄), filtered and evaporated. The residue was purified by silica gel column chromatography and eluted with 10 to 20% MeOH in dichloromethane to yield Compound 114 (1.45 g, 30%). The structure was confirmed by LCMS and ¹H NMR analysis.

[0890] Compound 114 (1.43 g, 0.8 mmol) was dissolved in 1:1 methanol/ethyl acetate (4 mL/4 mL). Palladium on carbon (wet, 0.14 g) was added. The reaction mixture was flushed with hydrogen and stirred at room temperature under hydrogen for 12 h. The reaction mixture was filtered through a pad of celite. The celite pad was washed with methanol/ethyl acetate (1:1). The filtrate and the washings were combined together and evaporated under reduced pressure to yield Compound 115 (quantitative). The structure was confirmed by LCMS and ¹H NMR analysis.

[0891] Compound 83a (0.17 g, 0.75 mmol), HBTU (0.31 g, 0.83 mmol) and DIEA (0.26 mL, 1.5 mmol) were dissolved in anhydrous DMF (5 mL) and the reaction mixture was stirred at room temperature for 5 min. To this a solution of Compound 115 (1.22 g, 0.75 mmol) in anhydrous DMF was added and the reaction was stirred at room temperature for 6 h. The solvent was removed under reduced pressure and the residue was dissolved in CH₂Cl₂. The organic layer was washed aqueous saturated NaHCO₃ solution and brine and dried over anhydrous Na₂SO₄ and filtered. The organic layer was concentrated to dryness and the residue obtained was purified by silica gel column chromatography and eluted with 3 to 15% MeOH in dichloromethane to yield Compound 116 (0.84 g, 61%). The structure was confirmed by LC MS and ¹H NMR analysis.

[chemical structure]

[0892] Compound 116 (0.74 g, 0.4 mmol) was dissolved in 1:1 methanol/ethyl acetate (5 mL/5 mL). Palladium on carbon (wet, 0.074 g) was added. The reaction mixture was flushed with hydrogen and stirred at room temperature under hydrogen for 12 h. The reaction mixture was filtered through a pad of celite. The celite pad was washed with methanol/ethyl acetate (1:1). The filtrate and the washings were combined together and evaporated under reduced pressure to yield compound 117 (0.73 g, 98%). The structure was confirmed by LCMS and ¹H NMR analysis.

[0893] Compound 117 (0.63 g, 0.36 mmol) was dissolved in anhydrous DMF (3 mL). To this solution N,N-Diisopropylethylamine (70 μL, 0.4 mmol) and pentafluorophenyl trifluoroacetate (72 μL, 0.42 mmol) were added. The reaction mixture was stirred at room temperature for 12 h and poured into a aqueous saturated NaHCO₃ solution. The mixture was extracted with dichloromethane, washed with brine and dried over anhydrous Na₂SO₄. The dichloromethane solution was concentrated to dryness and purified with silica gel column chromatography and eluted with 5 to 10% MeOH in dichloromethane to yield compound 118 (0.51 g, 79%). The structure was confirmed by LCMS and ¹H and ¹H and ¹⁹F NMR.

[chemical structure]

[0894] Oligomeric Compound 119, comprising a GalNAc₃-7 conjugate group, was prepared using the general procedures illustrated in Example 46. The GalNAc₃ cluster portion of the conjugate group GalNAc₃-7 (GalNAc₃-7ₐ) can be combined with any cleavable moiety to provide a variety of conjugate groups. In certain embodiments, the cleavable moiety is —P(═O)(OH)-A_{d}-P(═O)(OH)—.

[0895] The structure of GalNAc₃-7 (GalNAc₃-7ₐ-CM-) is shown below:

[chemical structure]

### Example 49: Preparation of Oligonucleotide 132 Comprising GalNAc₃-5

[chemical structure]

[0897] Compound 120 (14.01 g, 40 mmol) and HBTU (14.06 g, 37 mmol) were dissolved in anhydrous DMF (80 mL). Triethylamine (11.2 mL, 80.35 mmol) was added and stirred for 5 min. The reaction mixture was cooled in an ice bath and a solution of compound 121 (10 g, mmol) in anhydrous DMF (20 mL) was added. Additional triethylamine (4.5 mL, 32.28 mmol) was added and the reaction mixture was stirred for 18 h under an argon atmosphere. The reaction was monitored by TLC (ethyl acetate:hexane; 1:1; Rf=0.47). The solvent was removed under reduced pressure. The residue was taken up in EtOAc (300 mL) and washed with 1M NaHSO₄ (3×150 mL), aqueous saturated NaHCO₃ solution (3×150 mL) and brine (2×100 mL). Organic layer was dried with Na₂SO₄. Drying agent was removed by filtration and organic layer was concentrated by rotary evaporation. Crude mixture was purified by silica gel column chromatography and eluted by using 35-50% EtOAc in hexane to yield a compound 122 (15.50 g, 78.13%). The structure was confirmed by LCMS and ¹H NMR analysis. Mass m/z 589.3 [M+H]⁺.

[0898] A solution of LiOH (92.15 mmol) in water (20 mL) and THF (10 mL) was added to a cooled solution of Compound 122 (7.75 g, 13.16 mmol) dissolved in methanol (15 mL). The reaction mixture was stirred at room temperature for 45 min. and monitored by TLC (EtOAc:hexane; 1:1). The reaction mixture was concentrated to half the volume under reduced pressure. The remaining solution was cooled an ice bath and neutralized by adding concentrated HCl. The reaction mixture was diluted, extracted with EtOAc (120 mL) and washed with brine (100 mL). An emulsion formed and cleared upon standing overnight. The organic layer was separated dried (Na₂SO₄), filtered and evaporated to yield Compound 123 (8.42 g). Residual salt is the likely cause of excess mass. LCMS is consistent with structure. Product was used without any further purification. M.W.cal: 574.36; M.W.fd: 575.3 [M+H]⁺.

[chemical structure]

[0899] Compound 126 was synthesized following the procedure described in the literature (J. Am. Chem. Soc. 2011, 133, 958-963).

[chemical structure]

[chemical structure]

[0900] Compound 123 (7.419 g, 12.91 mmol), HOBt (3.49 g, 25.82 mmol) and compound 126 (6.33 g, 16.14 mmol) were dissolved in and DMF (40 mL) and the resulting reaction mixture was cooled in an ice bath. To this N,N-Diisopropylethylamine (4.42 mL, 25.82 mmol), PyBop (8.7 g, 16.7 mmol) followed by Bop coupling reagent (1.17 g, 2.66 mmol) were added under an argon atmosphere. The ice bath was removed and the solution was allowed to warm to room temperature. The reaction was completed after 1 h as determined by TLC (DCM:MeOH:AA; 89:10:1). The reaction mixture was concentrated under reduced pressure. The residue was dissolved in EtOAc (200 mL) and washed with 1 M NaHSO₄ (3×100 mL), aqueous saturated NaHCO₃ (3×100 mL) and brine (2×100 mL). The organic phase separated dried (Na₂SO₄), filtered and concentrated. The residue was purified by silica gel column chromatography with a gradient of 50% hexanes/EtOAC to 100% EtOAc to yield Compound 127 (9.4 g) as a white foam. LCMS and ¹H NMR were consistent with structure. Mass m/z 778.4 [M+H]⁺.

[0901] Trifluoroacetic acid (12 mL) was added to a solution of compound 127 (1.57 g, 2.02 mmol) in dichloromethane (12 mL) and stirred at room temperature for 1 h. The reaction mixture was co-evaporated with toluene (30 mL) under reduced pressure to dryness. The residue obtained was co-evaporated twice with acetonitrile (30 mL) and toluene (40 mL) to yield Compound 128 (1.67 g) as trifluoro acetate salt and used for next step without further purification. LCMS and ¹H NMR were consistent with structure. Mass m/z 478.2 [M+H]⁺.

[0902] Compound 7 (0.43 g, 0.963 mmol), HATU (0.35 g, 0.91 mmol), and HOAt (0.035 g, 0.26 mmol) were combined together and dried for 4 h over P₂O₅ under reduced pressure in a round bottom flask and then dissolved in anhydrous DMF (1 mL) and stirred for 5 min. To this a solution of compound 128 (0.20 g, 0.26 mmol) in anhydrous DMF (0.2 mL) and N,N-Diisopropylethylamine (0.2 mL) was added. The reaction mixture was stirred at room temperature under an argon atmosphere. The reaction was complete after 30 min as determined by LCMS and TLC (7% MeOH/DCM). The reaction mixture was concentrated under reduced pressure. The residue was dissolved in DCM (30 mL) and washed with 1 M NaHSO₄ (3×20 mL), aqueous saturated NaHCO₃ (3×20 mL) and brine (3×20 mL). The organic phase was separated, dried over Na₂SO₄, filtered and concentrated. The residue was purified by silica gel column chromatography using 5-15% MeOH in dichloromethane to yield Compound 129 (96.6 mg). LC MS and ¹H NMR are consistent with structure. Mass m/z 883.4 [M+2H]⁺.

[0903] Compound 129 (0.09 g, 0.051 mmol) was dissolved in methanol (5 mL) in 20 mL scintillation vial. To this was added a small amount of 10% Pd/C (0.015 mg) and the reaction vessel was flushed with H₂ gas. The reaction mixture was stirred at room temperature under H₂ atmosphere for 18 h. The reaction mixture was filtered through a pad of Celite and the Celite pad was washed with methanol. The filtrate washings were pooled together and concentrated under reduced pressure to yield Compound 130 (0.08 g). LCMS and ¹H NMR were consistent with structure. The product was used without further purification. Mass m/z 838.3 [M+2H]⁺.

[0904] To a 10 mL pointed round bottom flask were added compound 130 (75.8 mg, 0.046 mmol), 0.37 M pyridine/DMF (200 μL) and a stir bar. To this solution was added 0.7 M pentafluorophenyl trifluoroacetate/DMF (100 μL) drop wise with stirring. The reaction was completed after 1 h as determined by LC MS. The solvent was removed under reduced pressure and the residue was dissolved in CHCl₃ (˜10 mL). The organic layer was partitioned against NaHSO₄ (1 M, 10 mL), aqueous saturated NaHCO₃ (10 mL) and brine (10 mL) three times each. The organic phase separated and dried over Na₂SO₄, filtered and concentrated to yield Compound 131 (77.7 mg). LCMS is consistent with structure. Used without further purification. Mass m/z 921.3 [M+2H]⁺.

[chemical structure]

[0905] Oligomeric Compound 132, comprising a GalNAc₃-5 conjugate group, was prepared using the general procedures illustrated in Example 46. The GalNAc₃ cluster portion of the conjugate group GalNAc₃-5 (GalNAc₃-5ₐ) can be combined with any cleavable moiety to provide a variety of conjugate groups. In certain embodiments, the cleavable moiety is —P(═O)(OH)-A_{d}-P(═O)(OH)—.

[0906] The structure of GalNAc₃-5 (GalNAc₃-5ₐ-CM-) is shown below:

[chemical structure]

### Example 50: Preparation of Oligonucleotide 144 Comprising GalNAc₄-11

[chemical structure]

[chemical structure]

[0908] Synthesis of Compound 134: To a Merrifield flask was added aminomethyl VIMAD resin (2.5 g, 450 μmol/g) that was washed with acetonitrile, dimethylformamide, dichloromethane and acetonitrile. The resin was swelled in acetonitrile (4 mL). Compound 133 was pre-activated in a 100 mL round bottom flask by adding 20 (1.0 mmol, 0.747 g), TBTU (1.0 mmol, 0.321 g), acetonitrile (5 mL) and DIEA (3.0 mmol, 0.5 mL). This solution was allowed to stir for 5 min and was then added to the Merrifield flask with shaking. The suspension was allowed to shake for 3 h. The reaction mixture was drained and the resin was washed with acetonitrile, DMF and DCM. New resin loading was quantitated by measuring the absorbance of the DMT cation at 500 nm (extinction coefficient=76000) in DCM and determined to be 238 μmol/g. The resin was capped by suspending in an acetic anhydride solution for ten minutes three times.

[0909] The solid support bound compound 141 was synthesized using iterative Fmoc-based solid phase peptide synthesis methods. A small amount of solid support was withdrawn and suspended in aqueous ammonia (28-30 wt %) for 6 h. The cleaved compound was analyzed by LC-MS and the observed mass was consistent with structure. Mass m/z 1063.8 [M+2H]⁺.

[0910] The solid support bound compound 142 was synthesized using solid phase peptide synthesis methods.

[chemical structure]

[0911] The solid support bound compound 143 was synthesized using standard solid phase synthesis on a DNA synthesizer.

[0912] The solid support bound compound 143 was suspended in aqueous ammonia (28-30 wt %) and heated at 55° C. for 16 h. The solution was cooled and the solid support was filtered. The filtrate was concentrated and the residue dissolved in water and purified by HPLC on a strong anion exchange column. The fractions containing full length compound 144 were pooled together and desalted. The resulting GalNAc₄-11 conjugated oligomeric compound was analyzed by LC-MS and the observed mass was consistent with structure.

[0913] The GalNAc₄ cluster portion of the conjugate group GalNAc₄-11 (GalNAc₄-11ₐ) can be combined with any cleavable moiety to provide a variety of conjugate groups. In certain embodiments, the cleavable moiety is —P(═O)(OH)-A_{d}-P(═O)(OH)—.

[0914] The structure of GalNAc₄-11 (GalNAc₄-11ₐ-CM) is shown below:

[chemical structure]

### Example 51: Preparation of Oligonucleotide 155 Comprising GalNAc₃-6

[chemical structure]

[0916] Compound 146 was synthesized as described in the literature (Analytical Biochemistry 1995, 229, 54-60).

[chemical structure]

[0917] Compound 4 (15 g, 45.55 mmol) and compound 35b (14.3 grams, 57 mmol) were dissolved in CH₂Cl₂ (200 ml). Activated molecular sieves (4 Å. 2 g, powdered) were added, and the reaction was allowed to stir for 30 minutes under nitrogen atmosphere. TMS-OTf was added (4.1 ml, 22.77 mmol) and the reaction was allowed to stir at room temp overnight. Upon completion, the reaction was quenched by pouring into solution of saturated aqueous NaHCO₃ (500 ml) and crushed ice (˜150 g). The organic layer was separated, washed with brine, dried over MgSO₄, filtered, and was concentrated to an orange oil under reduced pressure. The crude material was purified by silica gel column chromatography and eluted with 2-10% MeOH in CH₂Cl₂ to yield Compound 112 (16.53 g, 63%). LCMS and ¹H NMR were consistent with the expected compound.

[0918] Compound 112 (4.27 g, 7.35 mmol) was dissolved in 1:1 MeOH/EtOAc (40 ml). The reaction mixture was purged by bubbling a stream of argon through the solution for 15 minutes. Pearlman's catalyst (palladium hydroxide on carbon, 400 mg) was added, and hydrogen gas was bubbled through the solution for 30 minutes. Upon completion (TLC 10% MeOH in CH₂Cl₂, and LCMS), the catalyst was removed by filtration through a pad of celite. The filtrate was concentrated by rotary evaporation, and was dried briefly under high vacuum to yield Compound 105a (3.28 g). LCMS and 1H NMR were consistent with desired product.

[0919] Compound 147 (2.31 g, 11 mmol) was dissolved in anhydrous DMF (100 mL). N,N-Diisopropylethylamine (DIEA, 3.9 mL, 22 mmol) was added, followed by HBTU (4 g, 10.5 mmol). The reaction mixture was allowed to stir for ˜15 minutes under nitrogen. To this a solution of compound 105a (3.3 g, 7.4 mmol) in dry DMF was added and stirred for 2 h under nitrogen atmosphere. The reaction was diluted with EtOAc and washed with saturated aqueous NaHCO₃ and brine. The organics phase was separated, dried (MgSO₄), filtered, and concentrated to an orange syrup. The crude material was purified by column chromatography 2-5% MeOH in CH₂Cl₂ to yield Compound 148 (3.44 g, 73%). LCMS and ¹H NMR were consistent with the expected product.

[0920] Compound 148 (3.3 g, 5.2 mmol) was dissolved in 1:1 MeOH/EtOAc (75 ml). The reaction mixture was purged by bubbling a stream of argon through the solution for 15 minutes. Pearlman's catalyst (palladium hydroxide on carbon) was added (350 mg). Hydrogen gas was bubbled through the solution for 30 minutes. Upon completion (TLC 10% MeOH in DCM, and LCMS), the catalyst was removed by filtration through a pad of celite. The filtrate was concentrated by rotary evaporation, and was dried briefly under high vacuum to yield Compound 149 (2.6 g). LCMS was consistent with desired product. The residue was dissolved in dry DMF (10 ml) was used immediately in the next step.

[chemical structure]

[0921] Compound 146 (0.68 g, 1.73 mmol) was dissolved in dry DMF (20 ml). To this DIEA (450 μL, 2.6 mmol, 1.5 eq.) and HBTU (1.96 g, 0.5.2 mmol) were added. The reaction mixture was allowed to stir for 15 minutes at room temperature under nitrogen. A solution of compound 149 (2.6 g) in anhydrous DMF (10 mL) was added. The pH of the reaction was adjusted to pH=9-10 by addition of DIEA (if necessary). The reaction was allowed to stir at room temperature under nitrogen for 2 h. Upon completion the reaction was diluted with EtOAc (100 mL), and washed with aqueous saturated aqueous NaHCO₃, followed by brine. The organic phase was separated, dried over MgSO₄, filtered, and concentrated. The residue was purified by silica gel column chromatography and eluted with 2-10% MeOH in CH₂Cl₂ to yield Compound 150 (0.62 g, 20%). LCMS and ¹H NMR were consistent with the desired product.

[0922] Compound 150 (0.62 g) was dissolved in 1:1 MeOH/EtOAc (5 L). The reaction mixture was purged by bubbling a stream of argon through the solution for 15 minutes. Pearlman's catalyst (palladium hydroxide on carbon) was added (60 mg). Hydrogen gas was bubbled through the solution for 30 minutes. Upon completion (TLC 10% MeOH in DCM, and LCMS), the catalyst was removed by filtration (syringe-tip Teflon filter, 0.45 μm). The filtrate was concentrated by rotary evaporation, and was dried briefly under high vacuum to yield Compound 151 (0.57 g). The LCMS was consistent with the desired product. The product was dissolved in 4 mL dry DMF and was used immediately in the next step.

[chemical structure]

[0923] Compound 83a (0.11 g, 0.33 mmol) was dissolved in anhydrous DMF (5 mL) and N,N-Diisopropylethylamine (75 μL, 1 mmol) and PFP-TFA (90 μL, 0.76 mmol) were added. The reaction mixture turned magenta upon contact, and gradually turned orange over the next 30 minutes. Progress of reaction was monitored by TLC and LCMS. Upon completion (formation of the PFP ester), a solution of compound 151 (0.57 g, 0.33 mmol) in DMF was added. The pH of the reaction was adjusted to pH=9-10 by addition of N,N-Diisopropylethylamine (if necessary). The reaction mixture was stirred under nitrogen for ˜30 min. Upon completion, the majority of the solvent was removed under reduced pressure. The residue was diluted with CH₂Cl₂ and washed with aqueous saturated NaHCO₃, followed by brine. The organic phase separated, dried over MgSO₄, filtered, and concentrated to an orange syrup. The residue was purified by silica gel column chromatography (2-10% MeOH in CH₂Cl₂) to yield Compound 152 (0.35 g, 55%). LCMS and ¹H NMR were consistent with the desired product.

[0924] Compound 152 (0.35 g, 0.182 mmol) was dissolved in 1:1 MeOH/EtOAc (10 mL). The reaction mixture was purged by bubbling a stream of argon thru the solution for 15 minutes. Pearlman's catalyst (palladium hydroxide on carbon) was added (35 mg). Hydrogen gas was bubbled thru the solution for 30 minutes. Upon completion (TLC 10% MeOH in DCM, and LCMS), the catalyst was removed by filtration (syringe-tip Teflon filter, 0.45 μm). The filtrate was concentrated by rotary evaporation, and was dried briefly under high vacuum to yield Compound 153 (0.33 g, quantitative). The LCMS was consistent with desired product.

[0925] Compound 153 (0.33 g, 0.18 mmol) was dissolved in anhydrous DMF (5 mL) with stirring under nitrogen. To this N,N-Diisopropylethylamine (65 μL, 0.37 mmol) and PFP-TFA (35 μL, 0.28 mmol) were added. The reaction mixture was stirred under nitrogen for ˜30 min. The reaction mixture turned magenta upon contact, and gradually turned orange. The pH of the reaction mixture was maintained at pH=9-10 by adding more N,-Diisopropylethylamine. The progress of the reaction was monitored by TLC and LCMS. Upon completion, the majority of the solvent was removed under reduced pressure. The residue was diluted with CH₂Cl₂ (50 mL), and washed with saturated aqueous NaHCO₃, followed by brine. The organic layer was dried over MgSO₄, filtered, and concentrated to an orange syrup. The residue was purified by column chromatography and eluted with 2-10% MeOH in CH₂Cl₂ to yield Compound 154 (0.29 g, 79%). LCMS and ¹H NMR were consistent with the desired product.

[chemical structure]

[0926] Oligomeric Compound 155, comprising a GalNAc₃-6 conjugate group, was prepared using the general procedures illustrated in Example 46. The GalNAc₃ cluster portion of the conjugate group GalNAc₃-6 (GalNAc₃-6ₐ) can be combined with any cleavable moiety to provide a variety of conjugate groups. In certain embodiments, the cleavable moiety is —P(═O)(OH)-A_{d}-P(═O)(OH)—.

[0927] The structure of GalNAc₃-6 (GalNAc₃-6ₐ-CM-) is shown below:

[chemical structure]

### Example 52: Preparation of Oligonucleotide 160 Comprising GalNAc₃-9

[chemical structure]

[0929] Compound 156 was synthesized following the procedure described in the literature (J. Med. Chem. 2004, 47, 5798-5808).

[0930] Compound 156, (18.60 g, 29.28 mmol) was dissolved in methanol (200 mL). Palladium on carbon (6.15 g, 10 wt %, loading (dry basis), matrix carbon powder, wet) was added. The reaction mixture was stirred at room temperature under hydrogen for 18 h. The reaction mixture was filtered through a pad of celite and the celite pad was washed thoroughly with methanol. The combined filtrate was washed and concentrated to dryness. The residue was purified by silica gel column chromatography and eluted with 5-10% methanol in dichloromethane to yield Compound 157 (14.26 g, 89%). Mass m/z 544.1 [M−H]⁻.

[0931] Compound 157 (5 g, 9.17 mmol) was dissolved in anhydrous DMF (30 mL). HBTU (3.65 g, 9.61 mmol) and N,N-Diisopropylethylamine (13.73 mL, 78.81 mmol) were added and the reaction mixture was stirred at room temperature for 5 minutes. To this a solution of compound 47 (2.96 g, 7.04 mmol) was added. The reaction was stirred at room temperature for 8 h. The reaction mixture was poured into a saturated NaHCO₃ aqueous solution. The mixture was extracted with ethyl acetate and the organic layer was washed with brine and dried (Na₂SO₄), filtered and evaporated. The residue obtained was purified by silica gel column chromatography and eluted with 50% ethyl acetate in hexane to yield compound 158 (8.25 g, 73.3%). The structure was confirmed by MS and ¹H NMR analysis.

[0932] Compound 158 (7.2 g, 7.61 mmol) was dried over P₂O₅ under reduced pressure. The dried compound was dissolved in anhydrous DMF (50 mL). To this 1H-tetrazole (0.43 g, 6.09 mmol) and N-methylimidazole (0.3 mL, 3.81 mmol) and 2-cyanoethyl-N,N,N′,N′-tetraisopropyl phosphorodiamidite (3.65 mL, 11.50 mmol) were added. The reaction mixture was stirred t under an argon atmosphere for 4 h. The reaction mixture was diluted with ethyl acetate (200 mL). The reaction mixture was washed with saturated NaHCO₃ and brine. The organic phase was separated, dried (Na₂SO₄), filtered and evaporated. The residue was purified by silica gel column chromatography and eluted with 50-90% ethyl acetate in hexane to yield Compound 159 (7.82 g, 80.5%). The structure was confirmed by LCMS and ³¹P NMR analysis.

[chemical structure]

[0933] Oligomeric Compound 160, comprising a GalNAc₃-9 conjugate group, was prepared using standard oligonucleotide synthesis procedures. Three units of compound 159 were coupled to the solid support, followed by nucleotide phosphoramidites. Treatment of the protected oligomeric compound with aqueous ammonia yielded compound 160. The GalNAc₃ cluster portion of the conjugate group GalNAc₃-9 (GalNAc₃-9ₐ) can be combined with any cleavable moiety to provide a variety of conjugate groups. In certain embodiments, the cleavable moiety is —P(═O)(OH)-A_{d}-P(═O)(OH)—. The structure of GalNAc₃-9 (GalNAc₃-9ₐ-CM) is shown below:

[chemical structure]

### Example 53: Alternate Procedure for Preparation of Compound 18 (GalNAc₃-1a and GalNAc₃-3a)

[0934] Lactone 161 was reacted with diamino propane (3-5 eq) or Mono-Boc protected diamino propane (1 eq) to provide alcohol 162a or 162b. When unprotected propanediamine was used for the above reaction, the excess diamine was removed by evaporation under high vacuum and the free amino group in 162a was protected using CbzCl to provide 162b as a white solid after purification by column chromatography. Alcohol 162b was further reacted with compound 4 in the presence of TMSOTf to provide 163a which was converted to 163b by removal of the Cbz group using catalytic hydrogenation. The pentafluorophenyl (PFP) ester 164 was prepared by reacting triacid 113 (see Example 48) with PFPTFA (3.5 eq) and pyridine (3.5 eq) in DMF (0.1 to 0.5 M). The triester 164 was directly reacted with the amine 163b (3-4 eq) and DIPEA (3-4 eq) to provide Compound 18. The above method greatly facilitates purification of intermediates and minimizes the formation of byproducts which are formed using the procedure described in Example 4.

[chemical structure]

### Example 54: Alternate Procedure for Preparation of Compound 18 (GalNAc₃-1a and GalNAc₃-3a)

[0935] The triPFP ester 164 was prepared from acid 113 using the procedure outlined in example 53 above and reacted with mono-Boc protected diamine to provide 165 in essentially quantitative yield. The Boc groups were removed with hydrochloric acid or trifluoroacetic acid to provide the triamine which was reacted with the PFP activated acid 166 in the presence of a suitable base such as DIPEA to provide Compound 18.

[0936] The PFP protected Gal-NAc acid 166 was prepared from the corresponding acid by treatment with PFPTFA (1-1.2 eq) and pyridine (1-1.2 eq) in DMF. The precursor acid in turn was prepared from the corresponding alcohol by oxidation using TEMPO (0.2 eq) and BAIB in acetonitrile and water. The precursor alcohol was prepared from sugar intermediate 4 by reaction with 1,6-hexanediol (or 1,5-pentanediol or other diol for other n values) (2-4 eq) and TMSOTf using conditions described previously in example 47.

[chemical structure]

### Example 55: Dose-Dependent Study of Oligonucleotides Comprising Either a 3′ or 5′-Conjugate Group (Comparison of GalNAc₃-1, 3, 8 and 9) Targeting SRB-1 In Vivo

[0937] The oligonucleotides listed below were tested in a dose-dependent study for antisense inhibition of SRB-1 in mice. Unconjugated ISIS 353382 was included as a standard. Each of the various GalNAc₃ conjugate groups was attached at either the 3′ or 5′ terminus of the respective oligonucleotide by a phosphodiester linked 2′-deoxyadenosine nucleoside (cleavable moiety).

TABLE 39
Modified ASO targeting SRB-1

| | | | | SEQ |
|---|---|---|---|---|
| ASO | Sequence (5′ to 3′) | Motif | Conjugate | ID No. |
| ISIS 353382 | Gₑₛ^{m}CₑₛTₑₛTₑₛ^{m}CₑₛA_{ds}G_{ds}T_{ds}^{m}C_{ds}A_{ds}T_{ds}G_{ds}A_{ds} | 5/10/5 | none | 2304 |
| (parent) | ^{m}C_{ds}T_{ds}Tₑₛ^{m}Cₑₛ^{m}CₑₛTₑₛTₑ | | | |
| ISIS 655861 | Gₑₛ^{m}CₑₛTₑₛTₑₛ^{m}CₑₛA_{ds}G_{ds}T_{ds}^{m}C_{ds}A_{ds}T_{ds}G_{ds}A_{ds} | 5/10/5 | GalNAc₃-1 | 2305 |
| | ^{m}C_{ds}T_{ds}Tₑₛ^{m}Cₑₛ^{m}CₑₛTₑₛTₑₒA_{do′}-GalNAc₃-1ₐ | | | |
| ISIS 664078 | Gₑₛ^{m}CₑₛTₑₛTₑₛ^{m}CₑₛA_{ds}G_{ds}T_{ds}^{m}C_{ds}A_{ds}T_{ds}G_{ds}A_{ds} | 5/10/5 | GalNAc₃-9 | 2305 |
| | ^{m}C_{ds}T_{ds}Tₑₛ^{m}Cₑₛ^{m}CₑₛTₑₛTₑₒA_{do′}-GalNAc₃-9ₐ | | | |
| ISIS 661161 | GalNAc₃-3ₐ-_{o′}A_{do} | 5/10/5 | GalNAc₃-3 | 2304 |
| | Gₑₛ^{m}CₑₛTₑₛTₑₛ^{m}CₑₛA_{ds}G_{ds}T_{ds}^{m}C_{ds}A_{ds}T_{ds}G_{ds}A_{ds} | | | |
| | ^{m}C_{ds}T_{ds}Tₑₛ^{m}Cₑₛ^{m}CₑₛTₑₛTₑ | | | |
| ISIS 665001 | GalNAc₃-8ₐ-_{o′}A_{do} | 5/10/5 | GalNAc₃-8 | 2304 |
| | Gₑₛ^{m}CₑₛTₑₛTₑₛ^{m}CₑₛA_{ds}G_{ds}T_{ds}^{m}C_{ds}A_{ds}T_{ds}G_{ds}A_{ds} | | | |
| | ^{m}C_{ds}T_{ds}Tₑₛ^{m}Cₑₛ^{m}CₑₛTₑₛTₑ | | | |

[0938] Capital letters indicate the nucleobase for each nucleoside and ^{m}C indicates a 5-methyl cytosine. Subscripts: “e” indicates a 2′-MOE modified nucleoside; “d” indicates a β-D-2′-deoxyribonucleoside; “s” indicates a phosphorothioate internucleoside linkage (PS); “o” indicates a phosphodiester internucleoside linkage (PO); and “o′” indicates —O—P(═O)(OH)—. Conjugate groups are in bold.

[0939] The structure of GalNAc₃-1ₐ was shown previously in Example 9. The structure of GalNAc₃-9 was shown previously in Example 52. The structure of GalNAc₃-3 was shown previously in Example 39. The structure of GalNAc₃-8 was shown previously in Example 47.

### Treatment

[0940] Six week old male Balb/c mice (Jackson Laboratory, Bar Harbor, Me.) were injected subcutaneously once at the dosage shown below with ISIS 353382, 655861, 664078, 661161, 665001 or with saline. Each treatment group consisted of 4 animals. The mice were sacrificed 72 hours following the final administration to determine the liver SRB-1 mRNA levels using real-time PCR and RIBOGREEN® RNA quantification reagent (Molecular Probes, Inc. Eugene, Oreg.) according to standard protocols. The results below are presented as the average percent of SRB-1 mRNA levels for each treatment group, normalized to the saline control.

[0941] As illustrated in Table 40, treatment with antisense oligonucleotides lowered SRB-1 mRNA levels in a dose-dependent manner Indeed, the antisense oligonucleotides comprising the phosphodiester linked GalNAc₃-1 and GalNAc₃-9 conjugates at the 3′ terminus (ISIS 655861 and ISIS 664078) and the GalNAc₃-3 and GalNAc₃-8 conjugates linked at the 5′ terminus (ISIS 661161 and ISIS 665001) showed substantial improvement in potency compared to the unconjugated antisense oligonucleotide (ISIS 353382). Furthermore, ISIS 664078, comprising a GalNAc₃-9 conjugate at the 3′ terminus was essentially equipotent compared to ISIS 655861, which comprises a GalNAc₃-1 conjugate at the 3′ terminus. The 5′ conjugated antisense oligonucleotides, ISIS 661161 and ISIS 665001, comprising a GalNAc₃-3 or GalNAc₃-9, respectively, had increased potency compared to the 3′ conjugated antisense oligonucleotides (ISIS 655861 and ISIS 664078).

TABLE 40
ASOs containing GalNAc₃-1,3,8 or 9 targeting SRB-1

| | Dosage | SRB-1 mRNA | |
|---|---|---|---|
| ISIS No. | (mg/kg) | (% Saline) | Conjugate |
| Saline | n/a | 100 | |
| 353382 | 3 | 88 | none |
| | 10 | 68 | |
| | 30 | 36 | |
| 655861 | 0.5 | 98 | GalNAc₃-1 (3′) |
| | 1.5 | 76 | |
| | 5 | 31 | |
| | 15 | 20 | |
| 664078 | 0.5 | 88 | GalNAc₃-9 (3′) |
| | 1.5 | 85 | |
| | 5 | 46 | |
| | 15 | 20 | |
| 661161 | 0.5 | 92 | GalNAc₃-3 (5′) |
| | 1.5 | 59 | |
| | 5 | 19 | |
| | 15 | 11 | |
| 665001 | 0.5 | 100 | GalNAc₃-8 (5′) |
| | 1.5 | 73 | |
| | 5 | 29 | |
| | 15 | 13 | |

[0942] Liver transaminase levels, alanine aminotransferase (ALT) and aspartate aminotransferase (AST), in serum were measured relative to saline injected mice using standard protocols. Total bilirubin and BUN were also evaluated. The change in body weights was evaluated with no significant change from the saline group. ALTs, ASTs, total bilirubin and BUN values are shown in the table below.

TABLE 41

| | Dosage | | | | Total | | |
|---|---|---|---|---|---|---|---|
| ISIS No. | mg/kg | | ALT | AST | Bilirubin | BUN | Conjugate |
| Saline | | | 24 | 59 | 0.1 | 37.52 | |
| 353382 | 3 | | 21 | 66 | 0.2 | 34.65 | none |
| | 10 | | 22 | 54 | 0.2 | 34.2 | |
| | 30 | | 22 | 49 | 0.2 | 33.72 | |
| 655861 | 0.5 | | 25 | 62 | 0.2 | 30.65 | GalNAc₃-1 (3′) |
| | 1.5 | | 23 | 48 | 0.2 | 30.97 | |
| | 5 | | 28 | 49 | 0.1 | 32.92 | |
| | 15 | | 40 | 97 | 0.1 | 31.62 | |
| 664078 | 0.5 | | 40 | 74 | 0.1 | 35.3 | GalNAc₃-9 (3′) |
| | 1.5 | | 47 | 104 | 0.1 | 32.75 | |
| | 5 | | 20 | 43 | 0.1 | 30.62 | |
| | 15 | | 38 | 92 | 0.1 | 26.2 | |
| 661161 | 0.5 | | 101 | 162 | 0.1 | 34.17 | GalNAc₃-3 (5′) |
| | 1.5 | g | 42 | 100 | 0.1 | 33.37 | |
| | 5 | g | 23 | 99 | 0.1 | 34.97 | |
| | 15 | | 53 | 83 | 0.1 | 34.8 | |
| 665001 | 0.5 | | 28 | 54 | 0.1 | 31.32 | GalNAc₃-8 (5′) |
| | 1.5 | | 42 | 75 | 0.1 | 32.32 | |
| | 5 | | 24 | 42 | 0.1 | 31.85 | |
| | 15 | | 32 | 67 | 0.1 | 31. | |

### Example 56: Dose-Dependent Study of Oligonucleotides Comprising Either a 3′ or 5′-Conjugate Group (Comparison of GalNAc₃-1, 2, 3, 5, 6, 7 and 10) Targeting SRB-1 In Vivo

[0943] The oligonucleotides listed below were tested in a dose-dependent study for antisense inhibition of SRB-1 in mice. Unconjugated ISIS 353382 was included as a standard. Each of the various GalNAc₃ conjugate groups was attached at the 5′ terminus of the respective oligonucleotide by a phosphodiester linked 2′-deoxyadenosine nucleoside (cleavable moiety) except for ISIS 655861 which had the GalNAc₃ conjugate group attached at the 3′ terminus.

TABLE 42
Modified ASO targeting SRB-1

| | | | | SEQ |
|---|---|---|---|---|
| ASO | Sequence (5′ to 3′) | Motif | Conjugate | ID No. |
| ISIS 353382 | Gₑₛ^{m}CₑₛTₑₛTₑₛ^{m}CₑₛA_{ds}G_{ds}T_{ds}^{m}C_{ds}A_{ds}T_{ds}G_{ds}A_{ds} | 5/10/5 | no conjugate | 2304 |
| (parent) | ^{m}C_{ds}T_{ds}Tₑₛ^{m}Cₑₛ^{m}CₑₛTₑₛTₑ | | | |
| ISIS 655861 | Gₑₛ^{m}CₑₛTₑₛTₑₛ^{m}CₑₛA_{ds}G_{ds}T_{ds}^{m}C_{ds}A_{ds}T_{ds}G_{ds}A_{ds} | 5/10/5 | GalNAc₃-1 | 2305 |
| | ^{m}C_{ds}T_{ds}Tₑₛ^{m}Cₑₛ^{m}CₑₛTₑₛTₑₒA_{do′}-GalNAc₃-1ₐ | | | |
| ISIS 664507 | GalNAc₃-2ₐ-_{o′}A_{do}Gₑₛ^{m}CₑₛTₑₛTₑₛ^{m}CₑₛA_{ds}G_{ds}T_{ds} | 5/10/5 | GalNAc₃-2 | 2306 |
| | ^{m}C_{ds}A_{ds}T_{ds}G_{ds}A_{ds}^{m}C_{ds}T_{ds}Tₑₛ^{m}Cₑₛ^{m}CₑₛTₑₛTₑ | | | |
| ISIS 661161 | GalNAc₃-3ₐ-_{o′}A_{do} | 5/10/5 | GalNAc₃-3 | 2304 |
| | Gₑₛ^{m}CₑₛTₑₛTₑₛ^{m}CₑₛA_{ds}G_{ds}T_{ds}^{m}C_{ds}A_{ds}T_{ds}G_{ds}A_{ds} | | | |
| | ^{m}C_{ds}T_{ds}Tₑₛ^{m}Cₑₛ^{m}CₑₛTₑₛTₑ | | | |
| ISIS 666224 | GalNAc₃-5ₐ-_{o′}A_{do}Gₑₛ^{m}CₑₛTₑₛTₑₛ^{m}CₑₛA_{ds}G_{ds}T_{ds} | 5/10/5 | GalNAc₃-5 | 2306 |
| | ^{m}C_{ds}A_{ds}T_{ds}G_{ds}A_{ds}^{m}C_{ds}T_{ds}Tₑₛ^{m}Cₑₛ^{m}CₑₛTₑₛTₑ | | | |
| ISIS 666961 | GalNAc₃-6ₐ-_{o′}A_{do}Gₑₛ^{m}CₑₛTₑₛTₑₛ^{m}CₑₛA_{ds}G_{ds}T_{ds} | 5/10/5 | GalNAc₃-6 | 2306 |
| | ^{m}C_{ds}A_{ds}T_{ds}G_{ds}A_{ds}^{m}C_{ds}T_{ds}Tₑₛ^{m}Cₑₛ^{m}CₑₛTₑₛTₑ | | | |
| ISIS 666981 | GalNAc₃-7ₐ-_{o′}A_{do}Gₑₛ^{m}CₑₛTₑₛTₑₛ^{m}CₑₛA_{ds}G_{ds}T_{ds} | 5/10/5 | GalNAc₃-7 | 2306 |
| | ^{m}C_{ds}A_{ds}T_{ds}G_{ds}A_{ds}^{m}C_{ds}T_{ds}Tₑₛ^{m}Cₑₛ^{m}CₑₛTₑₛTₑ | | | |
| ISIS 666881 | GalNAc₃-10ₐ-_{o′}A_{do}Gₑₛ^{m}CₑₛTₑₛTₑₛ^{m}CₑₛA_{ds}G_{ds}T_{ds} | 5/10/5 | GalNAc₃-10 | 2306 |
| | ^{m}C_{ds}A_{ds}T_{ds}G_{ds}A_{ds}^{m}C_{ds}T_{ds}Tₑₛ^{m}Cₑₛ^{m}CₑₛTₑₛTₑ | | | |

[0944] Capital letters indicate the nucleobase for each nucleoside and ^{m}C indicates a 5-methyl cytosine. Subscripts: “e” indicates a 2′-MOE modified nucleoside; “d” indicates a β-D-2′-deoxyribonucleoside; “s” indicates a phosphorothioate internucleoside linkage (PS); “o” indicates a phosphodiester internucleoside linkage (PO); and “o′” indicates —O—P(═O)(OH)—. Conjugate groups are in bold.

[0945] The structure of GalNAc₃-1ₐ was shown previously in Example 9. The structure of GalNAc₃-2ₐ was shown previously in Example 37. The structure of GalNAc₃-3ₐ was shown previously in Example 39. The structure of GalNAc₃-5ₐ was shown previously in Example 49. The structure of GalNAc₃-6ₐ was shown previously in Example 51. The structure of GalNAc₃-7ₐ was shown previously in Example 48. The structure of GalNAc₃-10ₐ was shown previously in Example 46.

### Treatment

[0946] Six week old male Balb/c mice (Jackson Laboratory, Bar Harbor, Me.) were injected subcutaneously once at the dosage shown below with ISIS 353382, 655861, 664507, 661161, 666224, 666961, 666981, 666881 or with saline. Each treatment group consisted of 4 animals. The mice were sacrificed 72 hours following the final administration to determine the liver SRB-1 mRNA levels using real-time PCR and RIBOGREEN® RNA quantification reagent (Molecular Probes, Inc. Eugene, Oreg.) according to standard protocols. The results below are presented as the average percent of SRB-1 mRNA levels for each treatment group, normalized to the saline control.

[0947] As illustrated in Table 43, treatment with antisense oligonucleotides lowered SRB-1 mRNA levels in a dose-dependent manner. Indeed, the conjugated antisense oligonucleotides showed substantial improvement in potency compared to the unconjugated antisense oligonucleotide (ISIS 353382). The 5′ conjugated antisense oligonucleotides showed a slight increase in potency compared to the 3′ conjugated antisense oligonucleotide.

TABLE 43

| | Dosage | SRB-1 mRNA | |
|---|---|---|---|
| ISIS No. | (mg/kg) | (% Saline) | Conjugate |
| Saline | n/a | 100.0 | |
| 353382 | 3 | 96.0 | none |
| | 10 | 73.1 | |
| | 30 | 36.1 | |
| 655861 | 0.5 | 99.4 | GalNAc₃-1 (3′) |
| | 1.5 | 81.2 | |
| | 5 | 33.9 | |
| | 15 | 15.2 | |
| 664507 | 0.5 | 102.0 | GalNAc₃-2 (5′) |
| | 1.5 | 73.2 | |
| | 5 | 31.3 | |
| | 15 | 10.8 | |
| 661161 | 0.5 | 90.7 | GalNAc₃-3 (5′) |
| | 1.5 | 67.6 | |
| | 5 | 24.3 | |
| | 15 | 11.5 | |
| 666224 | 0.5 | 96.1 | GalNAc₃-5 (5′) |
| | 1.5 | 61.6 | |
| | 5 | 25.6 | |
| | 15 | 11.7 | |
| 666961 | 0.5 | 85.5 | GalNAc₃-6 (5′) |
| | 1.5 | 56.3 | |
| | 5 | 34.2 | |
| | 15 | 13.1 | |
| 666981 | 0.5 | 84.7 | GalNAc₃-7 (5′) |
| | 1.5 | 59.9 | |
| | 5 | 24.9 | |
| | 15 | 8.5 | |
| 666881 | 0.5 | 100.0 | Ga1NAc₃-10 (5′) |
| | 1.5 | 65.8 | |
| | 5 | 26.0 | |
| | 15 | 13.0 | |

[0948] Liver transaminase levels, alanine aminotransferase (ALT) and aspartate aminotransferase (AST), in serum were measured relative to saline injected mice using standard protocols. Total bilirubin and BUN were also evaluated. The change in body weights was evaluated with no significant change from the saline group. ALTs, ASTs, total bilirubin and BUN values are shown in Table 44 below.

TABLE 44

| | Dosage | | | | Total | | |
|---|---|---|---|---|---|---|---|
| ISIS No. | mg/kg | | ALT | AST | Bilirubin | BUN | Conjugate |
| Saline | | | 26 | 57 | 0.2 | 27 | |
| 353382 | 3 | | 25 | 92 | 0.2 | 27 | none |
| | 10 | | 23 | 40 | 0.2 | 25 | |
| | 30 | | 29 | 54 | 0.1 | 28 | |
| 655861 | 0.5 | | 25 | 71 | 0.2 | 34 | GalNAc₃-1 (3′) |
| | 1.5 | | 28 | 60 | 0.2 | 26 | |
| | 5 | | 26 | 63 | 0.2 | 28 | |
| | 15 | | 25 | 61 | 0.2 | 28 | |
| 664507 | 0.5 | | 25 | 62 | 0.2 | 25 | GalNAc₃-2 (5′) |
| | 1.5 | | 24 | 49 | 0.2 | 26 | |
| | 5 | | 21 | 50 | 0.2 | 26 | |
| | 15 | | 59 | 84 | 0.1 | 22 | |
| 661161 | 0.5 | | 20 | 42 | 0.2 | 29 | GalNAc₃-3 (5′) |
| | 1.5 | g | 37 | 74 | 0.2 | 25 | |
| | 5 | g | 28 | 61 | 0.2 | 29 | |
| | 15 | | 21 | 41 | 0.2 | 25 | |
| 666224 | 0.5 | | 34 | 48 | 0.2 | 21 | GalNAc₃-5 (5′) |
| | 1.5 | | 23 | 46 | 0.2 | 26 | |
| | 5 | | 24 | 47 | 0.2 | 23 | |
| | 15 | | 32 | 49 | 0.1 | 26 | |
| 666961 | 0.5 | | 17 | 63 | 0.2 | 26 | GalNAc₃-6 (5′) |
| | 1.5 | | 23 | 68 | 0.2 | 26 | |
| | 5 | | 25 | 66 | 0.2 | 26 | |
| | 15 | | 29 | 107 | 0.2 | 28 | |
| 666981 | 0.5 | | 24 | 48 | 0.2 | 26 | GalNAc₃-7 (5′) |
| | 1.5 | | 30 | 55 | 0.2 | 24 | |
| | 5 | | 46 | 74 | 0.1 | 24 | |
| | 15 | | 29 | 58 | 0.1 | 26 | |
| 666881 | 0.5 | | 20 | 65 | 0.2 | 27 | GalNAc₃-10 (5′) |
| | 1.5 | | 23 | 59 | 0.2 | 24 | |
| | 5 | | 45 | 70 | 0.2 | 26 | |
| | 15 | | 21 | 57 | 0.2 | 24 | |

### Example 57: Duration of Action Study of Oligonucleotides Comprising a 3′-Conjugate Group Targeting ApoC III In Vivo

[0949] Mice were injected once with the doses indicated below and monitored over the course of 42 days for ApoC-III and plasma triglycerides (Plasma TG) levels. The study was performed using 3 transgenic mice that express human APOC-III in each group.

TABLE 45
Modified ASO targeting ApoC III

| | | | SEQ ID |
|---|---|---|---|
| ASO | Sequence (5′ to 3′) | Linkages | No. |
| ISIS | AₑₛGₑₛ^{m}CₑₛTₑₛTₑₛ^{m}C_{ds}T_{ds}T_{ds}G_{ds}T_{ds} | PS | 2296 |
| 304801 | ^{m}C_{ds}^{m}C_{ds}A_{ds}G_{ds}^{m}C_{ds}TₑₛTₑₛTₑₛAₑₛTₑ | | |
| ISIS | AₑₛGₑₛ^{m}CₑₛTₑₛTₑₛ^{m}C_{ds}T_{ds}T_{ds}G_{ds}T_{ds}^{m}C_{ds}^{m}C_{ds} | PS | 2297 |
| 647535 | A_{ds}G_{ds}^{m}C_{ds}TₑₛTₑₛTₑₛAₑₛTₑₒA_{do′}-GalNAc₃-1ₐ | | |
| ISIS | AₑₛGₑₒ^{m}CₑₒTₑₒTₑₒ^{m}C_{ds}T_{ds}T_{ds}G_{ds}T_{ds}^{m}C_{ds}^{m}C_{ds} | PO/PS | 2297 |
| 647536 | A_{ds}G_{ds}^{m}C_{ds}TₑₒTₑₒTₑₛAₑₛTₑₒA_{do′}-GalNAc₃-1ₐ | | |

[0950] Capital letters indicate the nucleobase for each nucleoside and ^{m}C indicates a 5-methyl cytosine. Subscripts: “e” indicates a 2′-MOE modified nucleoside; “d” indicates a β-D-2′-deoxyribonucleoside; “s” indicates a phosphorothioate internucleoside linkage (PS); “o” indicates a phosphodiester internucleoside linkage (PO); and “o′” indicates —O—P(═O)(OH)—. Conjugate groups are in bold.

[0951] The structure of GalNAc₃-1ₐ was shown previously in Example 9.

TABLE 46
ApoC III mRNA (% Saline on Day 1) and Plasma TG Levels (% Saline on Day 1)

| ASO | Dose | Target | Day 3 | Day 7 | Day 14 | Day 35 | Day 42 |
|---|---|---|---|---|---|---|---|
| Saline | 0 mg/kg | ApoC-III | 98 | 100 | 100 | 95 | 116 |
| ISIS 304801 | 30 mg/kg | ApoC-III | 28 | 30 | 41 | 65 | 74 |
| ISIS 647535 | 10 mg/kg | ApoC-III | 16 | 19 | 25 | 74 | 94 |
| ISIS 647536 | 10 mg/kg | ApoC-III | 18 | 16 | 17 | 35 | 51 |
| Saline | 0 mg/kg | Plasma TG | 121 | 130 | 123 | 105 | 109 |
| ISIS 304801 | 30 mg/kg | Plasma TG | 34 | 37 | 50 | 69 | 69 |
| ISIS 647535 | 10 mg/kg | Plasma TG | 18 | 14 | 24 | 18 | 71 |
| ISIS 647536 | 10 mg/kg | Plasma TG | 21 | 19 | 15 | 32 | 35 |

[0952] As can be seen in the table above the duration of action increased with addition of the 3′-conjugate group compared to the unconjugated oligonucleotide. There was a further increase in the duration of action for the conjugated mixed PO/PS oligonucleotide 647536 as compared to the conjugated full PS oligonucleotide 647535.

### Example 58: Dose-Dependent Study of Oligonucleotides Comprising a 3′-Conjugate Group (Comparison of GalNAc₃-1 and GalNAc₄-11) Targeting SRB-1 In Vivo

[0953] The oligonucleotides listed below were tested in a dose-dependent study for antisense inhibition of SRB-1 in mice. Unconjugated ISIS 440762 was included as an unconjugated standard. Each of the conjugate groups were attached at the 3′ terminus of the respective oligonucleotide by a phosphodiester linked 2′-deoxyadenosine nucleoside cleavable moiety.

[0954] The structure of GalNAc₃-1ₐ was shown previously in Example 9. The structure of GalNAc₃-11ₐ was shown previously in Example 50.

### Treatment

[0955] Six week old male Balb/c mice (Jackson Laboratory, Bar Harbor, Me.) were injected subcutaneously once at the dosage shown below with ISIS 440762, 651900, 663748 or with saline. Each treatment group consisted of 4 animals. The mice were sacrificed 72 hours following the final administration to determine the liver SRB-1 mRNA levels using real-time PCR and RIBOGREEN® RNA quantification reagent (Molecular Probes, Inc. Eugene, Oreg.) according to standard protocols. The results below are presented as the average percent of SRB-1 mRNA levels for each treatment group, normalized to the saline control.

[0956] As illustrated in Table 47, treatment with antisense oligonucleotides lowered SRB-1 mRNA levels in a dose-dependent manner. The antisense oligonucleotides comprising the phosphodiester linked GalNAc₃-1 and GalNAc₄-11 conjugates at the 3′ terminus (ISIS 651900 and ISIS 663748) showed substantial improvement in potency compared to the unconjugated antisense oligonucleotide (ISIS 440762). The two conjugated oligonucleotides, GalNAc₃-1 and GalNAc₄-11, were equipotent.

TABLE 47
Modified ASO targeting SRB-1

| | | | % Saline | SEQ ID |
|---|---|---|---|---|
| ASO | Sequence (5′ to 3′) | Dose mg/kg | control | No. |
| Saline | | | 100 | |
| ISIS 440762 | Tₖₛ^{m}CₖₛA_{ds}G_{ds}T_{ds}^{m}C_{ds}A_{ds}T_{ds}G_{ds}A_{ds} | 0.6 | 73.45 | 2298 |
| | ^{m}C_{ds}T_{ds}Tₖₛ^{m}Cₖ | 2 | 59.66 | |
| | | 6 | 23.50 | |
| ISIS 651900 | Tₖₛ^{m}CₖₛA_{ds}G_{ds}T_{ds}^{m}C_{ds}A_{ds}T_{ds}G_{ds}A_{ds} | 0.2 | 62.75 | 2299 |
| | ^{m}C_{ds}T_{ds}Tₖₛ^{m}CₖₒA_{do′}-GalNAc₃-1ₐ | 0.6 | 29.14 | |
| | | 2 | 8.61 | |
| | | 6 | 5.62 | |
| ISIS 663748 | Tₖₛ^{m}CₖₛA_{ds}G_{ds}T_{ds}^{m}C_{ds}A_{ds}T_{ds}G_{ds}A_{ds} | 0.2 | 63.99 | 2299 |
| | ^{m}C_{ds}T_{ds}Tₖₛ^{m}CₖₒA_{do′}-GalNAc₄-11ₐ | 0.6 | 33.53 | |
| | | 2 | 7.58 | |
| | | 6 | 5.52 | |

[0957] Capital letters indicate the nucleobase for each nucleoside and ^{m}C indicates a 5-methyl cytosine. Subscripts: “e” indicates a 2′-MOE modified nucleoside; “k” indicates 6′-(S)—CH₃ bicyclic nucleoside; “d” indicates β-D-2′-deoxyribonucleoside; “s” indicates a phosphorothioate internucleoside linkage (PS); “o” indicates a phosphodiester internucleoside linkage (PO); and “o” indicates —O—P(═O)(OH)—. Conjugate groups are in bold.

[0958] Liver transaminase levels, alanine aminotransferase (ALT) and aspartate aminotransferase (AST), in serum were measured relative to saline injected mice using standard protocols. Total bilirubin and BUN were also evaluated. The change in body weights was evaluated with no significant change from the saline group. ALTs, ASTs, total bilirubin and BUN values are shown in Table 48 below.

TABLE 48

| | Dosage | | | Total | | |
|---|---|---|---|---|---|---|
| ISIS No. | mg/kg | ALT | AST | Bilirubin | BUN | Conjugate |
| Saline | | 30 | 76 | 0.2 | 40 | |
| 440762 | 0.60 | 32 | 70 | 0.1 | 35 | none |
| | 2 | 26 | 57 | 0.1 | 35 | |
| | 6 | 31 | 48 | 0.1 | 39 | |
| 651900 | 0.2 | 32 | 115 | 0.2 | 39 | GalNAc₃-1 (3′) |
| | 0.6 | 33 | 61 | 0.1 | 35 | |
| | 2 | 30 | 50 | 0.1 | 37 | |
| | 6 | 34 | 52 | 0.1 | 36 | |
| 663748 | 0.2 | 28 | 56 | 0.2 | 36 | GalNAc₄-11 (3′) |
| | 0.6 | 34 | 60 | 0.1 | 35 | |
| | 2 | 44 | 62 | 0.1 | 36 | |
| | 6 | 38 | 71 | 0.1 | 33 | |

### Example 59: Effects of GalNAc₃-1 Conjugated ASOs Targeting FXI In Vivo

[0959] The oligonucleotides listed below were tested in a multiple dose study for antisense inhibition of FXI in mice. ISIS 404071 was included as an unconjugated standard. Each of the conjugate groups was attached at the 3′ terminus of the respective oligonucleotide by a phosphodiester linked 2′-deoxyadenosine nucleoside cleavable moiety.

TABLE 49
Modified ASOs targeting FXI

| | | | SEQ ID |
|---|---|---|---|
| ASO | Sequence (5′ to 3′) | Linkages | No. |
| ISIS | TₑₛGₑₛGₑₛTₑₛAₑₛA_{ds}T_{ds}^{m}C_{ds}^{m}C_{ds}A_{ds}^{m}C_{ds} | PS | 2307 |
| 404071 | T_{ds}T_{ds}T_{ds}^{m}C_{ds}AₑₛGₑₛAₑₛGₑₛGₑ | | |
| ISIS | TₑₛGₑₛGₑₛTₑₛAₑₛA_{ds}T_{ds}^{m}C_{ds}^{m}C_{ds}A_{ds}^{m}C_{ds} | PS | 2308 |
| 656172 | T_{ds}T_{ds}T_{ds}^{m}C_{ds}AₑₛGₑₛAₑₛGₑₛGₑₒA_{do′}-GalNAc₃-1ₐ | | |
| ISIS | TₑₛGₑₒGₑₒTₑₒAₑₒA_{ds}T_{ds}^{m}C_{ds}^{m}C_{ds}A_{ds}^{m}C_{ds} | PO/PS | 2308 |
| 656173 | T_{ds}T_{ds}T_{ds}^{m}C_{ds}AₑₒGₑₒAₑₛGₑₛGₑₒA_{do′}-GalNAc₃-1ₐ | | |

[0960] Capital letters indicate the nucleobase for each nucleoside and ^{m}C indicates a 5-methyl cytosine. Subscripts: “e” indicates a 2′-MOE modified nucleoside; “d” indicates a β-D-2′-deoxyribonucleoside; “s” indicates a phosphorothioate internucleoside linkage (PS); “o” indicates a phosphodiester internucleoside linkage (PO); and “o′” indicates —O—P(═O)(OH)—. Conjugate groups are in bold.

[0961] The structure of GalNAc₃-1ₐ was shown previously in Example 9.

### Treatment

[0962] Six week old male Balb/c mice (Jackson Laboratory, Bar Harbor, Me.) were injected subcutaneously twice a week for 3 weeks at the dosage shown below with ISIS 404071, 656172, 656173 or with PBS treated control. Each treatment group consisted of 4 animals. The mice were sacrificed 72 hours following the final administration to determine the liver FXI mRNA levels using real-time PCR and RIBOGREEN® RNA quantification reagent (Molecular Probes, Inc. Eugene, Oreg.) according to standard protocols. Plasma FXI protein levels were also measured using ELISA. FXI mRNA levels were determined relative to total RNA (using RIBOGREEN®), prior to normalization to PBS-treated control. The results below are presented as the average percent of FXI mRNA levels for each treatment group. The data was normalized to PBS-treated control and is denoted as “% PBS”. The ED₅₀s were measured using similar methods as described previously and are presented below.

TABLE 50
Factor XI mRNA (% Saline)

| | Dose | | | |
|---|---|---|---|---|
| ASO | mg/kg | % Control | Conjugate | Linkages |
| Saline | | 100 | none | |
| ISIS | 3 | 92 | none | PS |
| 404071 | 10 | 40 | | |
| | 30 | 15 | | |
| ISIS | 0.7 | 74 | GalNAc₃-1 | PS |
| 656172 | 2 | 33 | | |
| | 6 | 9 | | |
| ISIS | 0.7 | 49 | GalNAc₃-1 | PO/PS |
| 656173 | 2 | 22 | | |
| | 6 | 1 | | |

[0963] As illustrated in Table 50, treatment with antisense oligonucleotides lowered FXI mRNA levels in a dose-dependent manner. The oligonucleotides comprising a 3′-GalNAc₃-1 conjugate group showed substantial improvement in potency compared to the unconjugated antisense oligonucleotide (ISIS 404071). Between the two conjugated oligonucleotides an improvement in potency was further provided by substituting some of the PS linkages with PO (ISIS 656173).

[0964] As illustrated in Table 50a, treatment with antisense oligonucleotides lowered FXI protein levels in a dose-dependent manner. The oligonucleotides comprising a 3′-GalNAc₃-1 conjugate group showed substantial improvement in potency compared to the unconjugated antisense oligonucleotide (ISIS 404071). Between the two conjugated oligonucleotides an improvement in potency was further provided by substituting some of the PS linkages with PO (ISIS 656173).

TABLE 50a
Factor XI protein (% Saline)

| | Dose | Protein (% | | |
|---|---|---|---|---|
| ASO | mg/kg | Control) | Conjugate | Linkages |
| Saline | | 100 | none | |
| ISIS | 3 | 127 | none | PS |
| 404071 | 10 | 32 | | |
| | 30 | 3 | | |
| ISIS | 0.7 | 70 | GalNAc₃-1 | PS |
| 656172 | 2 | 23 | | |
| | 6 | 1 | | |
| ISIS | 0.7 | 45 | GalNAc₃-1 | PO/PS |
| 656173 | 2 | 6 | | |
| | 6 | 0 | | |

[0965] Liver transaminase levels, alanine aminotransferase (ALT) and aspartate aminotransferase (AST), in serum were measured relative to saline injected mice using standard protocols. Total bilirubin, total albumin, CRE and BUN were also evaluated. The change in body weights was evaluated with no significant change from the saline group. ALTs, ASTs, total bilirubin and BUN values are shown in the table below.

TABLE 51

| | Dosage | | | Total | Total | | | |
|---|---|---|---|---|---|---|---|---|
| ISIS No. | mg/kg | ALT | AST | Albumin | Bilirubin | CRE | BUN | Conjugate |
| Saline | | 71.8 | 84.0 | 3.1 | 0.2 | 0.2 | 22.9 | |
| 404071 | 3 | 152.8 | 176.0 | 3.1 | 0.3 | 0.2 | 23.0 | none |
| | 10 | 73.3 | 121.5 | 3.0 | 0.2 | 0.2 | 21.4 | |
| | 30 | 82.5 | 92.3 | 3.0 | 0.2 | 0.2 | 23.0 | |
| 656172 | 0.7 | 62.5 | 111.5 | 3.1 | 0.2 | 0.2 | 23.8 | GalNAc₃-1 |
| | 2 | 33.0 | 51.8 | 2.9 | 0.2 | 0.2 | 22.0 | (3′) |
| | 6 | 65.0 | 71.5 | 3.2 | 0.2 | 0.2 | 23.9 | |
| 656173 | 0.7 | 54.8 | 90.5 | 3.0 | 0.2 | 0.2 | 24.9 | GalNAc₃-1 |
| | 2 | 85.8 | 71.5 | 3.2 | 0.2 | 0.2 | 21.0 | (3′) |
| | 6 | 114.0 | 101.8 | 3.3 | 0.2 | 0.2 | 22.7 | |

### Example 60: Effects of Conjugated ASOs Targeting SRB-1 In Vitro

[0966] The oligonucleotides listed below were tested in a multiple dose study for antisense inhibition of SRB-1 in primary mouse hepatocytes. ISIS 353382 was included as an unconjugated standard. Each of the conjugate groups were attached at the 3′ or 5′ terminus of the respective oligonucleotide by a phosphodiester linked 2′-deoxyadenosine nucleoside cleavable moiety.

TABLE 52
Modified ASO targeting SRB-1

| | | | | SEQ |
|---|---|---|---|---|
| ASO | Sequence (5′ to 3′) | Motif | Conjugate | ID No. |
| ISIS 353382 | Gₑₛ^{m}CₑₛTₑₛTₑₛ^{m}CₑₛA_{ds}G_{ds}T_{ds}^{m}C_{ds}A_{ds}T_{ds}G_{ds}A_{ds} | 5/10/5 | none | 2304 |
| | ^{m}C_{ds}T_{ds}Tₑₛ^{m}Cₑₛ^{m}CₑₛTₑₛTₑ | | | |
| ISIS 655861 | Gₑₛ^{m}CₑₛTₑₛTₑₛ^{m}CₑₛA_{ds}G_{ds}T_{ds}^{m}C_{ds}A_{ds}T_{ds}G_{ds}A_{ds} | 5/10/5 | GalNAc₃-1 | 2305 |
| | ^{m}C_{ds}T_{ds}Tₑₛ^{m}Cₑₛ^{m}CₑₛTₑₛTₑₒA_{do′}-GalNAc₃-1a | | | |
| ISIS 655862 | Gₑₛ^{m}CₑₒTₑₒTₑₒ^{m}CₑₒA_{ds}G_{ds}T_{ds}^{m}C_{ds}A_{ds}T_{ds}G_{ds}A_{ds} | 5/10/5 | GalNAc₃-1 | 2305 |
| | ^{m}C_{ds}T_{ds}Tₑₛ^{m}Cₑₒ^{m}CₑₛTₑₛTₑₒA_{do′}-GalNAc₃-1a | | | |
| ISIS 661161 | GalNAc₃-3_{a-o′}A_{do}Gₑₛ^{m}CₑₛTₑₛTₑₛ^{m}CₑₛA_{ds}G_{ds} | 5/10/5 | GalNAc₃-3 | 2306 |
| | T_{ds}^{m}C_{ds}A_{ds}T_{ds}G_{ds}A_{ds}^{m}C_{ds}T_{ds}Tₑₛ^{m}Cₑₛ^{m}CₑₛTₑₛTₑ | | | |
| ISIS 665001 | GalNAc₃-8_{a-o′}A_{do}Gₑₛ^{m}CₑₛTₑₛTₑₛ^{m}CₑₛA_{ds}G_{ds} | 5/10/5 | GalNAc₃-8 | 2306 |
| | T_{ds}^{m}C_{ds}A_{ds}T_{ds}G_{ds}A_{ds}^{m}C_{ds}T_{ds}Tₑₛ^{m}Cₑₛ^{m}CₑₛTₑₛTₑ | | | |
| ISIS 664078 | Gₑₛ^{m}CₑₛTₑₛTₑₛ^{m}CₑₛA_{ds}G_{ds}T_{ds}^{m}C_{ds}A_{ds}T_{ds}G_{ds}A_{ds} | 5/10/5 | GalNAc₃-9 | 2305 |
| | ^{m}C_{ds}T_{ds}Tₑₛ^{m}Cₑₛ^{m}CₑₛTₑₛTₑₒA_{do′}-GalNAc₃-9ₐ | | | |
| ISIS 666961 | GalNAc₃-6ₐ-_{o′}A_{do}Gₑₛ^{m}CₑₛTₑₛTₑₛ^{m}CₑₛA_{ds}G_{ds} | 5/10/5 | GalNAc₃-6 | 2306 |
| | T_{ds}^{m}C_{ds}A_{ds}T_{ds}G_{ds}A_{ds}^{m}C_{ds}T_{ds}Tₑₛ^{m}Cₑₛ^{m}CₑₛTₑₛTₑ | | | |
| ISIS 664507 | GalNAc₃-2ₐ-_{o′}A_{do}Gₑₛ^{m}CₑₛTₑₛTₑₛ^{m}CₑₛA_{ds}G_{ds}T_{ds} | 5/10/5 | GalNAc₃-2 | 2306 |
| | ^{m}C_{ds}A_{ds}T_{ds}G_{ds}A_{ds}^{m}C_{ds}T_{ds}Tₑₛ^{m}Cₑₛ^{m}CₑₛTₑₛTₑ | | | |
| ISIS 666881 | GalNAc₃-10ₐ-_{o′}A_{do}Gₑₛ^{m}CₑₛTₑₛTₑₛ^{m}CₑₛA_{ds}G_{ds}T_{ds} | 5/10/5 | GalNAc₃-10 | 2306 |
| | ^{m}C_{ds}A_{ds}T_{ds}G_{ds}A_{ds}^{m}C_{ds}T_{ds}Tₑₛ^{m}Cₑₛ^{m}CₑₛTₑₛTₑ | | | |
| ISIS 666224 | GalNAc₃-5ₐ-_{o′}A_{do}Gₑₛ^{m}CₑₛTₑₛTₑₛ^{m}CₑₛA_{ds}G_{ds}T_{ds} | 5/10/5 | GalNAc₃-5 | 2306 |
| | ^{m}C_{ds}A_{ds}T_{ds}G_{ds}A_{ds}^{m}C_{ds}T_{ds}Tₑₛ^{m}Cₑₛ^{m}CₑₛTₑₛTₑ | | | |
| ISIS 666981 | GalNAc₃-7ₐ-_{o′}A_{do}Gₑₛ^{m}CₑₛTₑₛTₑₛ^{m}CₑₛA_{ds}G_{ds}T_{ds} | 5/10/5 | GalNAc₃-7 | 2306 |
| | ^{m}C_{ds}A_{ds}T_{ds}G_{ds}A_{ds}^{m}C_{ds}T_{ds}Tₑₛ^{m}Cₑₛ^{m}CₑₛTₑₛTₑ | | | |

[0967] Capital letters indicate the nucleobase for each nucleoside and ^{m}C indicates a 5-methyl cytosine. Subscripts: “e” indicates a 2′-MOE modified nucleoside; “d” indicates a β-D-2′-deoxyribonucleoside; “s” indicates a phosphorothioate internucleoside linkage (PS); “o” indicates a phosphodiester internucleoside linkage (PO); and “o′” indicates —O—P(═O)(OH)—. Conjugate groups are in bold.

[0968] The structure of GalNAc₃-1ₐ was shown previously in Example 9. The structure of GalNAc₃-3a was shown previously in Example 39. The structure of GalNAc₃-8a was shown previously in Example 47. The structure of GalNAc₃-9a was shown previously in Example 52. The structure of GalNAc₃-6a was shown previously in Example 51. The structure of GalNAc₃-2a was shown previously in Example 37. The structure of GalNAc₃-10a was shown previously in Example 46. The structure of GalNAc₃-5a was shown previously in Example 49. The structure of GalNAc₃-7a was shown previously in Example 48.

### Treatment

[0969] The oligonucleotides listed above were tested in vitro in primary mouse hepatocyte cells plated at a density of 25,000 cells per well and treated with 0.03, 0.08, 0.24, 0.74, 2.22, 6.67 or 20 nM modified oligonucleotide. After a treatment period of approximately 16 hours, RNA was isolated from the cells and mRNA levels were measured by quantitative real-time PCR and the SRB-1 mRNA levels were adjusted according to total RNA content, as measured by RIBOGREEN®.

[0970] The IC₅₀ was calculated using standard methods and the results are presented in Table 53. The results show that, under free uptake conditions in which no reagents or electroporation techniques are used to artificially promote entry of the oligonucleotides into cells, the oligonucleotides comprising a GalNAc conjugate were significantly more potent in hepatocytes than the parent oligonucleotide (ISIS 353382) that does not comprise a GalNAc conjugate.

TABLE 53

| | | Internucleoside | | SEQ |
|---|---|---|---|---|
| ASO | IC₅₀ (nM) | linkages | Conjugate | ID No. |
| ISIS 353382 | 190^{a} | PS | none | 2304 |
| ISIS 655861 | 11^{a} | PS | GalNAc₃-1 | 2305 |
| ISIS 655862 | 3 | PO/PS | GalNAc₃-1 | 2305 |
| ISIS 661161 | 15^{a} | PS | GalNAc₃-3 | 2306 |
| ISIS 665001 | 20 | PS | GalNAc₃-8 | 2306 |
| ISIS 664078 | 55 | PS | GalNAc₃-9 | 2305 |
| ISIS 666961 | 22^{a} | PS | GalNAc₃-6 | 2306 |
| ISIS 664507 | 30 | PS | GalNAc₃-2 | 2306 |
| ISIS 666881 | 30 | PS | GalNAc₃-10 | 2306 |
| ISIS 666224 | 30^{a} | PS | GalNAc₃-5 | 2306 |
| ISIS 666981 | 40 | PS | GalNAc₃-7 | 2306 |

^{a}Average of multiple runs.

### Example 61: Preparation of Oligomeric Compound 175 Comprising GalNAc₃-12

[chemical structure]

[chemical structure]

[chemical structure]

[chemical structure]

[0972] Compound 169 is commercially available. Compound 172 was prepared by addition of benzyl (perfluorophenyl) glutarate to compound 171. The benzyl (perfluorophenyl) glutarate was prepared by adding PFP-TFA and DIEA to 5-(benzyloxy)-5-oxopentanoic acid in DMF. Oligomeric compound 175, comprising a GalNAc₃-12 conjugate group, was prepared from compound 174 using the general procedures illustrated in Example 46. The GalNAc₃ cluster portion of the conjugate group GalNAc₃-12 (GalNAc₃-12ₐ) can be combined with any cleavable moiety to provide a variety of conjugate groups. In a certain embodiments, the cleavable moiety is —P(═O)(OH)-A_{d}-P(═O)(OH)—. The structure of GalNAc₃-12 (GalNAc₃-12ₐ-CM-) is shown below:

[chemical structure]

### Example 62: Preparation of Oligomeric Compound 180 Comprising GalNAc₃-13

[chemical structure]

[chemical structure]

[0974] Compound 176 was prepared using the general procedure shown in Example 2. Oligomeric compound 180, comprising a GalNAc₃-13 conjugate group, was prepared from compound 177 using the general procedures illustrated in Example 49. The GalNAc₃ cluster portion of the conjugate group GalNAc₃-13 (GalNAc₃-13ₐ) can be combined with any cleavable moiety to provide a variety of conjugate groups. In a certain embodiments, the cleavable moiety is —P(═O)(OH)-A_{d}-P(═O)(OH)—. The structure of GalNAc₃-13 (GalNAc₃-13ₐ-CM-) is shown below:

[chemical structure]

### Example 63: Preparation of Oligomeric Compound 188 Comprising GalNAc₃-14

[chemical structure]

[chemical structure]

[chemical structure]

[0976] Compounds 181 and 185 are commercially available. Oligomeric compound 188, comprising a GalNAc₃-14 conjugate group, was prepared from compound 187 using the general procedures illustrated in Example 46. The GalNAc₃ cluster portion of the conjugate group GalNAc₃-14 (GalNAc₃-14ₐ) can be combined with any cleavable moiety to provide a variety of conjugate groups. In certain embodiments, the cleavable moiety is —P(═O)(OH)-A_{d}-P(═O)(OH)—. The structure of GalNAc₃-14 (GalNAc₃-14ₐ-CM-) is shown below:

[chemical structure]

### Example 64: Preparation of Oligomeric Compound 197 Comprising GalNAc₃-15

[chemical structure]

[chemical structure]

[0978] Compound 189 is commercially available. Compound 195 was prepared using the general procedure shown in Example 31. Oligomeric compound 197, comprising a GalNAc₃-15 conjugate group, was prepared from compounds 194 and 195 using standard oligonucleotide synthesis procedures. The GalNAc₃ cluster portion of the conjugate group GalNAc₃-15 (GalNAc₃-15ₐ) can be combined with any cleavable moiety to provide a variety of conjugate groups. In certain embodiments, the cleavable moiety is —P(═O)(OH)-A_{d}-P(═O)(OH)—. The structure of GalNAc₃-15 (GalNAc₃-15ₐ-CM-) is shown below:

[chemical structure]

### Example 65: Dose-Dependent Study of Oligonucleotides Comprising a 5′-Conjugate Group (Comparison of GalNAc₃-3, 12, 13, 14, and 15) Targeting SRB-1 In Vivo

[0979] The oligonucleotides listed below were tested in a dose-dependent study for antisense inhibition of SRB-1 in mice. Unconjugated ISIS 353382 was included as a standard. Each of the GalNAc₃ conjugate groups was attached at the 5′ terminus of the respective oligonucleotide by a phosphodiester linked 2′-deoxyadenosine nucleoside (cleavable moiety).

TABLE 54
Modified ASOs targeting SRB-1

| | | | SEQ |
|---|---|---|---|
| ISIS No. | Sequences (5′ to 3′) | Conjugate | ID No. |
| 353382 | Gₑₛ^{m}CₑₛTₑₛTₑₛ^{m}CₑₛA_{ds}G_{ds}T_{ds}^{m}C_{ds}A_{ds}T_{ds}G_{ds}A_{ds}^{m}C_{ds}T_{ds}Tₑₛ^{m}Cₑₛ^{m}CₑₛTₑₛTₑ | none | 2304 |
| 661161 | GalNAc₃-3ₐ-_{o′}A_{do}Gₑₛ^{m}CₑₛTₑₛTₑₛ^{m}CₑₛA_{ds}G_{ds}T_{ds}^{m}C_{ds}A_{ds}T_{ds}G_{ds}A_{ds}^{m}C_{ds}T_{ds} | GalNAc₃-3 | 2306 |
| | Tₑₛ^{m}Cₑₛ^{m}CₑₛTₑₛTₑ | | |
| 671144 | GalNAc₃-12ₐ-_{o′}A_{do}Gₑₛ^{m}CₑₛTₑₛTₑₛ^{m}CₑₛA_{ds}G_{ds}T_{ds}^{m}C_{ds}A_{ds}T_{ds}G_{ds}A_{ds}^{m}C_{ds}T_{ds} | GalNAc₃-12 | 2306 |
| | Tₑₛ^{m}Cₑₛ^{m}CₑₛTₑₛTₑ | | |
| 670061 | GalNAc₃-13ₐ-_{o′}A_{do}Gₑₛ^{m}CₑₛTₑₛTₑₛ^{m}CₑₛA_{ds}G_{ds}T_{ds}^{m}C_{ds}A_{ds}T_{ds}G_{ds}A_{ds}^{m}C_{ds}T_{ds} | GalNAc₃-13 | 2306 |
| | Tₑₛ^{m}Cₑₛ^{m}CₑₛTₑₛTₑ | | |
| 671261 | GalNAc₃-14ₐ-_{o′}A_{do}Gₑₛ^{m}CₑₛTₑₛTₑₛ^{m}CₑₛA_{ds}G_{ds}T_{ds}^{m}C_{ds}A_{ds}T_{ds}G_{ds}A_{ds}^{m}C_{ds}T_{ds} | GalNAc₃-14 | 2306 |
| | Tₑₛ^{m}Cₑₛ^{m}CₑₛTₑₛTₑ | | |
| 671262 | GalNAc₃-15ₐ-_{o′}A_{do}Gₑₛ^{m}CₑₛTₑₛTₑₛ^{m}CₑₛA_{ds}G_{ds}T_{ds}^{m}C_{ds}A_{ds}T_{ds}G_{ds}A_{ds}^{m}C_{ds}T_{ds} | GalNAc₃-15 | 2306 |
| | Tₑₛ^{m}Cₑₛ^{m}CₑₛTₑₛTₑ | | |

[0980] Capital letters indicate the nucleobase for each nucleoside and ^{m}C indicates a 5-methyl cytosine. Subscripts: “e” indicates a 2′-MOE modified nucleoside; “d” indicates a β-D-2′-deoxyribonucleoside; “s” indicates a phosphorothioate internucleoside linkage (PS); “o” indicates a phosphodiester internucleoside linkage (PO); and “o′” indicates —O—P(═O)(OH)—. Conjugate groups are in bold.

[0981] The structure of GalNAc₃-3ₐ was shown previously in Example 39. The structure of GalNAc₃-12a was shown previously in Example 61. The structure of GalNAc₃-13a was shown previously in Example 62. The structure of GalNAc₃-14a was shown previously in Example 63. The structure of GalNAc₃-15a was shown previously in Example 64.

### Treatment

[0982] Six to eight week old C57bl6 mice (Jackson Laboratory, Bar Harbor, Me.) were injected subcutaneously once or twice at the dosage shown below with ISIS 353382, 661161, 671144, 670061, 671261, 671262, or with saline. Mice that were dosed twice received the second dose three days after the first dose. Each treatment group consisted of 4 animals. The mice were sacrificed 72 hours following the final administration to determine the liver SRB-1 mRNA levels using real-time PCR and RIBOGREEN® RNA quantification reagent (Molecular Probes, Inc. Eugene, Oreg.) according to standard protocols. The results below are presented as the average percent of SRB-1 mRNA levels for each treatment group, normalized to the saline control.

[0983] As illustrated in Table 55, treatment with antisense oligonucleotides lowered SRB-1 mRNA levels in a dose-dependent manner No significant differences in target knockdown were observed between animals that received a single dose and animals that received two doses (see ISIS 353382 dosages 30 and 2×15 mg/kg; and ISIS 661161 dosages 5 and 2×2.5 mg/kg). The antisense oligonucleotides comprising the phosphodiester linked GalNAc₃-3, 12, 13, 14, and 15 conjugates showed substantial improvement in potency compared to the unconjugated antisense oligonucleotide (ISIS 335382).

TABLE 55
SRB-1 mRNA (% Saline)

| ISIS | Dosage | SRB-1 mRNA | ED₅₀ | |
|---|---|---|---|---|
| No. | (mg/kg) | (% Saline) | (mg/kg) | Conjugate |
| Saline | n/a | 100.0 | n/a | n/a |
| 353382 | 3 | 85.0 | 22.4 | none |
| | 10 | 69.2 | | |
| | 30 | 34.2 | | |
| | 2 × 15 | 36.0 | | |
| 661161 | 0.5 | 87.4 | 2.2 | GalNAc₃-3 |
| | 1.5 | 59.0 | | |
| | 5 | 25.6 | | |
| | 2 × 2.5 | 27.5 | | |
| | 15 | 17.4 | | |
| 671144 | 0.5 | 101.2 | 3.4 | GalNAc₃-12 |
| | 1.5 | 76.1 | | |
| | 5 | 32.0 | | |
| | 15 | 17.6 | | |
| 670061 | 0.5 | 94.8 | 2.1 | GalNAc₃-13 |
| | 1.5 | 57.8 | | |
| | 5 | 20.7 | | |
| | 15 | 13.3 | | |
| 671261 | 0.5 | 110.7 | 4.1 | GalNAc₃-14 |
| | 1.5 | 81.9 | | |
| | 5 | 39.8 | | |
| | 15 | 14.1 | | |
| 671262 | 0.5 | 109.4 | 9.8 | GalNAc₃-15 |
| | 1.5 | 99.5 | | |
| | 5 | 69.2 | | |
| | 15 | 36.1 | | |

[0984] Liver transaminase levels, alanine aminotransferase (ALT) and aspartate aminotransferase (AST), in serum were measured relative to saline injected mice using standard protocols. Total bilirubin and BUN were also evaluated. The changes in body weights were evaluated with no significant differences from the saline group (data not shown). ALTs, ASTs, total bilirubin and BUN values are shown in Table 56 below.

TABLE 56

| | | | | Total | | |
|---|---|---|---|---|---|---|
| | Dosage | ALT | AST | Bilirubin | BUN | |
| ISIS No. | (mg/kg) | (U/L) | (U/L) | (mg/dL) | (mg/dL) | Conjugate |
| Saline | n/a | 28 | 60 | 0.1 | 39 | n/a |
| 353382 | 3 | 30 | 77 | 0.2 | 36 | none |
| | 10 | 25 | 78 | 0.2 | 36 | |
| | 30 | 28 | 62 | 0.2 | 35 | |
| | 2 × 15 | 22 | 59 | 0.2 | 33 | |
| 661161 | 0.5 | 39 | 72 | 0.2 | 34 | GalNAc₃-3 |
| | 1.5 | 26 | 50 | 0.2 | 33 | |
| | 5 | 41 | 80 | 0.2 | 32 | |
| | 2 × 2.5 | 24 | 72 | 0.2 | 28 | |
| | 15 | 32 | 69 | 0.2 | 36 | |
| 671144 | 0.5 | 25 | 39 | 0.2 | 34 | GalNAc₃-12 |
| | 1.5 | 26 | 55 | 0.2 | 28 | |
| | 5 | 48 | 82 | 0.2 | 34 | |
| | 15 | 23 | 46 | 0.2 | 32 | |
| 670061 | 0.5 | 27 | 53 | 0.2 | 33 | GalNAc₃-13 |
| | 1.5 | 24 | 45 | 0.2 | 35 | |
| | 5 | 23 | 58 | 0.1 | 34 | |
| | 15 | 24 | 72 | 0.1 | 31 | |
| 671261 | 0.5 | 69 | 99 | 0.1 | 33 | GalNAc₃-14 |
| | 1.5 | 34 | 62 | 0.1 | 33 | |
| | 5 | 43 | 73 | 0.1 | 32 | |
| | 15 | 32 | 53 | 0.2 | 30 | |
| 671262 | 0.5 | 24 | 51 | 0.2 | 29 | GalNAc₃-15 |
| | 1.5 | 32 | 62 | 0.1 | 31 | |
| | 5 | 30 | 76 | 0.2 | 32 | |
| | 15 | 31 | 64 | 0.1 | 32 | |

### Example 66: Effect of Various Cleavable Moieties on Antisense Inhibition In Vivo by Oligonucleotides Targeting SRB-1 Comprising a 5′-GalNAc₃ Cluster

[0985] The oligonucleotides listed below were tested in a dose-dependent study for antisense inhibition of SRB-1 in mice. Each of the GalNAc₃ conjugate groups was attached at the 5′ terminus of the respective oligonucleotide by a phosphodiester linked nucleoside (cleavable moiety (CM)).

TABLE 57
Modified ASOs targeting SRB-1

| ISIS | | GalNAc₃ | | SEQ |
|---|---|---|---|---|
| No. | Sequences (5′ to 3′) | Cluster | CM | ID No. |
| 661161 | GalNAc₃-3ₐ-_{o′}A_{do}Gₑₛ^{m}CₑₛTₑₛTₑₛ^{m}CₑₛA_{ds}G_{ds}T_{ds}^{m}C_{ds}A_{ds}T_{ds} | GalNAc₃-3a | A_{d} | 2306 |
| | G_{ds}A_{ds}^{m}C_{ds}T_{ds}Tₑₛ^{m}Cₑₛ^{m}CₑₛTₑₛTₑ | | | |
| 670690 | GalNAc₃-3ₐ-_{o′}T_{do}Gₑₛ^{m}CₑₒTₑₒTₑₒ^{m}CₑₒA_{ds}G_{ds}T_{ds}^{m}C_{ds}A_{ds}T_{ds} | GalNAc₃-3a | T_{d} | 2309 |
| | G_{ds}A_{ds}^{m}C_{ds}T_{ds}Tₑₒ^{m}Cₑₒ^{m}CₑₛTₑₛTₑ | | | |
| 670700 | GalNAc₃-3ₐ-_{o′}AₑₒGₑₛ^{m}CₑₒTₑₒTₑₒ^{m}CₑₒA_{ds}G_{ds}T_{ds}^{m}C_{ds}A_{ds}T_{ds} | GalNAc₃-3a | Aₑ | 2306 |
| | G_{ds}A_{ds}^{m}C_{ds}T_{ds}Tₑₒ^{m}Cₑₒ^{m}CₑₛTₑₛTₑ | | | |
| 670701 | GalNAc₃-3ₐ-_{o′}TₑₒGₑₛ^{m}CₑₒTₑₒTₑₒ^{m}CₑₒA_{ds}G_{ds}T_{ds}^{m}C_{ds}A_{ds}T_{ds} | GalNAc₃-3a | Tₑ | 2309 |
| | G_{ds}A_{ds}^{m}C_{ds}T_{ds}Tₑₒ^{m}Cₑₒ^{m}CₑₛTₑₛTₑ | | | |
| 671165 | GalNAc₃-13ₐ-_{o′}A_{do}Gₑₛ^{m}CₑₒTₑₒTₑₒ^{m}CₑₒA_{ds}G_{ds}T_{ds}^{m}C_{ds}A_{ds}T_{ds} | GalNAc₃-13a | A_{d} | 2306 |
| | G_{ds}A_{ds}^{m}C_{ds}T_{ds}Tₑₒ^{m}Cₑₒ^{m}CₑₛTₑₛTₑ | | | |

[0986] Capital letters indicate the nucleobase for each nucleoside and ^{m}C indicates a 5-methyl cytosine. Subscripts: “e” indicates a 2′-MOE modified nucleoside; “d” indicates a β-D-2′-deoxyribonucleoside; “s” indicates a phosphorothioate internucleoside linkage (PS); “o” indicates a phosphodiester internucleoside linkage (PO); and “o′” indicates —O—P(═O)(OH)—. Conjugate groups are in bold.

[0987] The structure of GalNAc₃-3ₐ was shown previously in Example 39. The structure of GalNAc₃-13a was shown previously in Example 62.

### Treatment

[0988] Six to eight week old C57BL/6 mice (Jackson Laboratory, Bar Harbor, Me.) were injected subcutaneously once at the dosage shown below with ISIS 661161, 670699, 670700, 670701, 671165, or with saline. Each treatment group consisted of 4 animals. The mice were sacrificed 72 hours following the final administration to determine the liver SRB-1 mRNA levels using real-time PCR and RIBOGREEN® RNA quantification reagent (Molecular Probes, Inc. Eugene, Oreg.) according to standard protocols. The results below are presented as the average percent of SRB-1 mRNA levels for each treatment group, normalized to the saline control.

[0989] As illustrated in Table 58, treatment with antisense oligonucleotides lowered SRB-1 mRNA levels in a dose-dependent manner. The antisense oligonucleotides comprising various cleavable moieties all demonstrated similar potencies.

TABLE 58
SRB-1 mRNA (% Saline)

| ISIS | Dosage | SRB-1 mRNA | GalNAc₃ | |
|---|---|---|---|---|
| No. | (mg/kg) | (% Saline) | Cluster | CM |
| Saline | n/a | 100.0 | n/a | n/a |
| 661161 | 0.5 | 87.8 | GalNAc₃-3a | A_{d} |
| | 1.5 | 61.3 | | |
| | 5 | 33.8 | | |
| | 15 | 14.0 | | |
| 670699 | 0.5 | 89.4 | GalNAc₃-3a | T_{d} |
| | 1.5 | 59.4 | | |
| | 5 | 31.3 | | |
| | 15 | 17.1 | | |
| 670700 | 0.5 | 79.0 | GalNAc₃-3a | Aₑ |
| | 1.5 | 63.3 | | |
| | 5 | 32.8 | | |
| | 15 | 17.9 | | |
| 670701 | 0.5 | 79.1 | GalNAc₃-3a | Tₑ |
| | 1.5 | 59.2 | | |
| | 5 | 35.8 | | |
| | 15 | 17.7 | | |
| 671165 | 0.5 | 76.4 | GalNAc₃-13a | A_{d} |
| | 1.5 | 43.2 | | |
| | 5 | 22.6 | | |
| | 15 | 10.0 | | |

[0990] Liver transaminase levels, alanine aminotransferase (ALT) and aspartate aminotransferase (AST), in serum were measured relative to saline injected mice using standard protocols. Total bilirubin and BUN were also evaluated. The changes in body weights were evaluated with no significant differences from the saline group (data not shown). ALTs, ASTs, total bilirubin and BUN values are shown in Table 59 below.

TABLE 59

| | | | | Total | | | |
|---|---|---|---|---|---|---|---|
| | | | | Bili- | | | |
| ISIS | Dosage | ALT | AST | rubin | BUN | GalNAc₃ | |
| No. | (mg/kg) | (U/L) | (U/L) | (mg/dL) | (mg/dL) | Cluster | CM |
| Saline | n/a | 24 | 64 | 0.2 | 31 | n/a | n/a |
| 661161 | 0.5 | 25 | 64 | 0.2 | 31 | GalNAc₃-3a | A_{d} |
| | 1.5 | 24 | 50 | 0.2 | 32 | | |
| | 5 | 26 | 55 | 0.2 | 28 | | |
| | 15 | 27 | 52 | 0.2 | 31 | | |
| 670699 | 0.5 | 42 | 83 | 0.2 | 31 | GalNAc₃-3a | T_{d} |
| | 1.5 | 33 | 58 | 0.2 | 32 | | |
| | 5 | 26 | 70 | 0.2 | 29 | | |
| | 15 | 25 | 67 | 0.2 | 29 | | |
| 670700 | 0.5 | 40 | 74 | 0.2 | 27 | GalNAc₃-3a | Aₑ |
| | 1.5 | 23 | 62 | 0.2 | 27 | | |
| | 5 | 24 | 49 | 0.2 | 29 | | |
| | 15 | 25 | 87 | 0.1 | 25 | | |
| 670701 | 0.5 | 30 | 77 | 0.2 | 27 | GalNAc₃- | Tₑ |
| | 1.5 | 22 | 55 | 0.2 | 30 | 3a | |
| | 5 | 81 | 101 | 0.2 | 25 | | |
| | 15 | 31 | 82 | 0.2 | 24 | | |
| 671165 | 0.5 | 44 | 84 | 0.2 | 26 | GalNAc₃- | A_{d} |
| | 1.5 | 47 | 71 | 0.1 | 24 | 13a | |
| | 5 | 33 | 91 | 0.2 | 26 | | |
| | 15 | 33 | 56 | 0.2 | 29 | | |

### Example 67: Preparation of Oligomeric Compound 199 Comprising GalNAc₃-16

[chemical structure]

[0992] Oligomeric compound 199, comprising a GalNAc₃-16 conjugate group, is prepared using the general procedures illustrated in Examples 7 and 9. The GalNAc₃ cluster portion of the conjugate group GalNAc₃-16 (GalNAc₃-16ₐ) can be combined with any cleavable moiety to provide a variety of conjugate groups. In certain embodiments, the cleavable moiety is —P(═O)(OH)-A_{d}-P(═O)(OH)—. The structure of GalNAc₃-16 (GalNAc₃-16ₐ-CM-) is shown below:

[chemical structure]

### Example 68: Preparation of Oligomeric Compound 200 Comprising GalNAc₃-17

[chemical structure]

[0994] Oligomeric compound 200, comprising a GalNAc₃-17 conjugate group, was prepared using the general procedures illustrated in Example 46. The GalNAc₃ cluster portion of the conjugate group GalNAc₃-17 (GalNAc₃-17ₐ) can be combined with any cleavable moiety to provide a variety of conjugate groups. In certain embodiments, the cleavable moiety is —P(═O)(OH)-A_{d}-P(═O)(OH)—. The structure of GalNAc₃-17 (GalNAc₃-17ₐ-CM-) is shown below:

[chemical structure]

### Example 69: Preparation of Oligomeric Compound 201 Comprising GalNAc₃-18

[chemical structure]

[0996] Oligomeric compound 201, comprising a GalNAc₃-18 conjugate group, was prepared using the general procedures illustrated in Example 46. The GalNAc₃ cluster portion of the conjugate group GalNAc₃-18 (GalNAc₃-18ₐ) can be combined with any cleavable moiety to provide a variety of conjugate groups. In certain embodiments, the cleavable moiety is —P(═O)(OH)-A_{d}-P(═O)(OH)—. The structure of GalNAc₃-18 (GalNAc₃-18ₐ-CM-) is shown below:

[chemical structure]

### Example 70: Preparation of Oligomeric Compound 204 Comprising GalNAc₃-19

[chemical structure]

[0998] Oligomeric compound 204, comprising a GalNAc₃-19 conjugate group, was prepared from compound 64 using the general procedures illustrated in Example 52. The GalNAc₃ cluster portion of the conjugate group GalNAc₃-19 (GalNAc₃-19ₐ) can be combined with any cleavable moiety to provide a variety of conjugate groups. In certain embodiments, the cleavable moiety is —P(═O)(OH)-A_{d}-P(═O)(OH)—. The structure of GalNAc₃-19 (GalNAc₃-19ₐ-CM-) is shown below:

[chemical structure]

### Example 71: Preparation of Oligomeric Compound 210 Comprising GalNAc₃-20

[chemical structure]

[chemical structure]

[1000] Compound 205 was prepared by adding PFP-TFA and DIEA to 6-(2,2,2-trifluoroacetamido)hexanoic acid in acetonitrile, which was prepared by adding triflic anhydride to 6-aminohexanoic acid. The reaction mixture was heated to 80° C., then lowered to rt. Oligomeric compound 210, comprising a GalNAc₃-20 conjugate group, was prepared from compound 208 using the general procedures illustrated in Example 52. The GalNAc₃ cluster portion of the conjugate group GalNAc₃-20 (GalNAc₃-20ₐ) can be combined with any cleavable moiety to provide a variety of conjugate groups. In certain embodiments, the cleavable moiety is —P(═O)(OH)-A_{d}-P(═O)(OH)—. The structure of GalNAc₃-20 (GalNAc₃-20ₐ-CM-) is shown below:

[chemical structure]

### Example 72: Preparation of Oligomeric Compound 215 Comprising GalNAc₃-21

[chemical structure]

[chemical structure]

[1002] Compound 211 is commercially available. Oligomeric compound 215, comprising a GalNAc₃-21 conjugate group, was prepared from compound 213 using the general procedures illustrated in Example 52. The GalNAc₃ cluster portion of the conjugate group GalNAc₃-21 (GalNAc₃-21ₐ) can be combined with any cleavable moiety to provide a variety of conjugate groups. In certain embodiments, the cleavable moiety is —P(═O)(OH)-A_{d}-P(═O)(OH)—. The structure of GalNAc₃-21 (GalNAc₃-21ₐ-CM-) is shown below:

[chemical structure]

### Example 73: Preparation of Oligomeric Compound 221 Comprising GalNAc₃-22

[chemical structure]

[chemical structure]

[1004] Compound 220 was prepared from compound 219 using diisopropylammonium tetrazolide. Oligomeric compound 221, comprising a GalNAc₃-21 conjugate group, is prepared from compound 220 using the general procedure illustrated in Example 52. The GalNAc₃ cluster portion of the conjugate group GalNAc₃-22 (GalNAc₃-22ₐ) can be combined with any cleavable moiety to provide a variety of conjugate groups. In certain embodiments, the cleavable moiety is —P(═O)(OH)-A_{d}-P(═O)(OH)—. The structure of GalNAc₃-22 (GalNAc₃-22ₐ-CM-) is shown below:

[chemical structure]

### Example 74: Effect of Various Cleavable Moieties on Antisense Inhibition In Vivo by Oligonucleotides Targeting SRB-1 Comprising a 5′-GalNAc₃ Conjugate

[1005] The oligonucleotides listed below were tested in a dose-dependent study for antisense inhibition of SRB-1 in mice. Each of the GalNAc₃ conjugate groups was attached at the 5′ terminus of the respective oligonucleotide.

TABLE 60
Modified ASOs targeting SRB-1

| ISIS | | GalNAc₃ | | SEQ |
|---|---|---|---|---|
| No. | Sequences (5′ to 3′) | Cluster | CM | ID No. |
| 353382 | Gₑₛ^{m}CₑₛTₑₛTₑₛ^{m}CₑₛA_{ds}G_{ds}T_{ds}^{m}C_{ds}A_{ds}T_{ds}G_{ds}A_{ds}^{m}C_{ds}T_{ds}Tₑₛ | n/a | n/a | 2304 |
| | ^{m}Cₑₛ^{m}CₑₛTₑₛTₑ | | | |
| 661161 | GalNAc₃-3ₐ-_{o′}A_{do}Gₑₛ^{m}CₑₛTₑₛTₑₛ^{m}CₑₛA_{ds}G_{ds}T_{ds}^{m}C_{ds}A_{ds}T_{ds} | GalNAc₃-3a | A_{d} | 2306 |
| | G_{ds}A_{ds}^{m}C_{ds}T_{ds}Tₑₛ^{m}Cₑₛ^{m}CₑₛTₑₛTₑ | | | |
| 666904 | GalNAc₃-3ₐ-_{o′}Gₑₛ^{m}CₑₛTₑₛTₑₛ^{m}CₑₛA_{ds}G_{ds}T_{ds}^{m}C_{ds}A_{ds}T_{ds} | GalNAc₃-3a | PO | 2304 |
| | G_{ds}A_{ds}^{m}C_{ds}T_{ds}Tₑₛ^{m}Cₑₛ^{m}CₑₛTₑₛTₑ | | | |
| 675441 | GalNAc₃-17ₐ-_{o′}A_{do}Gₑₛ^{m}CₑₛTₑₛTₑₛ^{m}CₑₛA_{ds}G_{dsT}_{ds}^{m}C_{ds}A_{ds}T_{ds} | GalNAc₃-17a | A_{d} | 2306 |
| | G_{ds}A_{ds}^{m}C_{ds}T_{ds}Tₑₛ^{m}Cₑₛ^{m}CₑₛTₑₛTₑ | | | |
| 675442 | GalNAc₃-18ₐ-_{o′}A_{do}Gₑₛ^{m}CₑₛTₑₛTₑₛ^{m}CₑₛA_{ds}G_{ds}T_{ds}^{m}C_{ds}A_{ds}T_{ds} | GalNAc₃-18a | A_{d} | 2306 |
| | G_{ds}A_{ds}^{m}C_{ds}T_{ds}Tₑₛ^{m}Cₑₛ^{m}CₑₛTₑₛTₑ | | | |

[1006] In all tables, capital letters indicate the nucleobase for each nucleoside and ^{m}C indicates a 5-methyl cytosine. Subscripts: “e” indicates a 2′-MOE modified nucleoside; “d” indicates β-D-2′-deoxyribonucleoside; “s” indicates a phosphorothioate internucleoside linkage (PS); “o” indicates a phosphodiester internucleoside linkage (PO); and “o′” indicates —O—P(═O)(OH)—. Conjugate groups are in bold.

[1007] The structure of GalNAc₃-3ₐ was shown previously in Example 39. The structure of GalNAc₃-17a was shown previously in Example 68, and the structure of GalNAc₃-18a was shown in Example 69.

### Treatment

[1008] Six to eight week old C57BL/6 mice (Jackson Laboratory, Bar Harbor, Me.) were injected subcutaneously once at the dosage shown below with an oligonucleotide listed in Table 60 or with saline. Each treatment group consisted of 4 animals. The mice were sacrificed 72 hours following the final administration to determine the SRB-1 mRNA levels using real-time PCR and RIBOGREEN® RNA quantification reagent (Molecular Probes, Inc. Eugene, Oreg.) according to standard protocols. The results below are presented as the average percent of SRB-1 mRNA levels for each treatment group, normalized to the saline control.

[1009] As illustrated in Table 61, treatment with antisense oligonucleotides lowered SRB-1 mRNA levels in a dose-dependent manner. The antisense oligonucleotides comprising a GalNAc conjugate showed similar potencies and were significantly more potent than the parent oligonucleotide lacking a GalNAc conjugate.

TABLE 61
SRB-1 mRNA (% Saline)

| ISIS | Dosage | SRB-1 mRNA | GalNAc₃ | |
|---|---|---|---|---|
| No. | (mg/kg) | (% Saline) | Cluster | CM |
| Saline | n/a | 100.0 | n/a | n/a |
| 353382 | 3 | 79.38 | n/a | n/a |
| | 10 | 68.67 | | |
| | 30 | 40.70 | | |
| 661161 | 0.5 | 79.18 | GalNAc₃-3a | A_{d} |
| | 1.5 | 75.96 | | |
| | 5 | 30.53 | | |
| | 15 | 12.52 | | |
| 666904 | 0.5 | 91.30 | GalNAc₃-3a | PO |
| | 1.5 | 57.88 | | |
| | 5 | 21.22 | | |
| | 15 | 16.49 | | |
| 675441 | 0.5 | 76.71 | GalNAc₃-17a | A_{d} |
| | 1.5 | 63.63 | | |
| | 5 | 29.57 | | |
| | 15 | 13.49 | | |
| 675442 | 0.5 | 95.03 | GalNAc₃-18a | A_{d} |
| | 1.5 | 60.06 | | |
| | 5 | 31.04 | | |
| | 15 | 19.40 | | |

[1010] Liver transaminase levels, alanine aminotransferase (ALT) and aspartate aminotransferase (AST), in serum were measured relative to saline injected mice using standard protocols. Total bilirubin and BUN were also evaluated. The change in body weights was evaluated with no significant change from the saline group (data not shown). ALTs, ASTs, total bilirubin and BUN values are shown in Table 62 below.

TABLE 62

| | | | | Total | | | |
|---|---|---|---|---|---|---|---|
| | | | | Bili- | | | |
| ISIS | Dosage | ALT | AST | rubin | BUN | GalNAc₃ | |
| No. | (mg/kg) | (U/L) | (U/L) | (mg/dL) | (mg/dL) | Cluster | CM |
| Saline | n/a | 26 | 59 | 0.16 | 42 | n/a | n/a |
| 353382 | 3 | 23 | 58 | 0.18 | 39 | n/a | n/a |
| | 10 | 28 | 58 | 0.16 | 43 | | |
| | 30 | 20 | 48 | 0.12 | 34 | | |
| 661161 | 0.5 | 30 | 47 | 0.13 | 35 | GalNAc₃-3a | A_{d} |
| | 1.5 | 23 | 53 | 0.14 | 37 | | |
| | 5 | 26 | 48 | 0.15 | 39 | | |
| | 15 | 32 | 57 | 0.15 | 42 | | |
| 666904 | 0.5 | 24 | 73 | 0.13 | 36 | GalNAc₃-3a | PO |
| | 1.5 | 21 | 48 | 0.12 | 32 | | |
| | 5 | 19 | 49 | 0.14 | 33 | | |
| | 15 | 20 | 52 | 0.15 | 26 | | |
| 675441 | 0.5 | 42 | 148 | 0.21 | 36 | GalNAc₃- | A_{d} |
| | 1.5 | 60 | 95 | 0.16 | 34 | 17a | |
| | 5 | 27 | 75 | 0.14 | 37 | | |
| | 15 | 24 | 61 | 0.14 | 36 | | |
| 675442 | 0.5 | 26 | 65 | 0.15 | 37 | GalNAc₃- | A_{d} |
| | 1.5 | 25 | 64 | 0.15 | 43 | 18a | |
| | 5 | 27 | 69 | 0.15 | 37 | | |
| | 15 | 30 | 84 | 0.14 | 37 | | |

### Example 75: Pharmacokinetic Analysis of Oligonucleotides Comprising a 5′-Conjugate Group

[1011] The PK of the ASOs in Tables 54, 57 and 60 above was evaluated using liver samples that were obtained following the treatment procedures described in Examples 65, 66, and 74. The liver samples were minced and extracted using standard protocols and analyzed by IP-HPLC-MS alongside an internal standard. The combined tissue level (μg/g) of all metabolites was measured by integrating the appropriate UV peaks, and the tissue level of the full-length ASO missing the conjugate (“parent,” which is Isis No. 353382 in this case) was measured using the appropriate extracted ion chromatograms (EIC).

TABLE 63
PK Analysis in Liver

| | | Total Tissue | Parent ASO | | |
|---|---|---|---|---|---|
| ISIS | Dosage | Level by | Tissue Level | GalNAc₃ | |
| No. | (mg/kg) | UV (μg/g) | by EIC (μg/g) | Cluster | CM |
| 353382 | 3 | 8.9 | 8.6 | n/a | n/a |
| | 10 | 22.4 | 21.0 | | |
| | 30 | 54.2 | 44.2 | | |
| 661161 | 5 | 32.4 | 20.7 | GalNAc₃-3a | A_{d} |
| | 15 | 63.2 | 44.1 | | |
| 671144 | 5 | 20.5 | 19.2 | GalNAc₃-12a | A_{d} |
| | 15 | 48.6 | 41.5 | | |
| 670061 | 5 | 31.6 | 28.0 | GalNAc₃-13a | A_{d} |
| | 15 | 67.6 | 55.5 | | |
| 671261 | 5 | 19.8 | 16.8 | GalNAc₃-14a | A_{d} |
| | 15 | 64.7 | 49.1 | | |
| 671262 | 5 | 18.5 | 7.4 | GalNAc₃-15a | A_{d} |
| | 15 | 52.3 | 24.2 | | |
| 670699 | 5 | 16.4 | 10.4 | GalNAc₃-3a | T_{d} |
| | 15 | 31.5 | 22.5 | | |
| 670700 | 5 | 19.3 | 10.9 | GalNAc₃-3a | Aₑ |
| | 15 | 38.1 | 20.0 | | |
| 670701 | 5 | 21.8 | 8.8 | GalNAc₃-3a | Tₑ |
| | 15 | 35.2 | 16.1 | | |
| 671165 | 5 | 27.1 | 26.5 | GalNAc₃-13a | A_{d} |
| | 15 | 48.3 | 44.3 | | |
| 666904 | 5 | 30.8 | 24.0 | GalNAc₃-3a | PO |
| | 15 | 52.6 | 37.6 | | |
| 675441 | 5 | 25.4 | 19.0 | GalNAc₃-17a | A_{d} |
| | 15 | 54.2 | 42.1 | | |
| 675442 | 5 | 22.2 | 20.7 | GalNAc₃-18a | A_{d} |
| | 15 | 39.6 | 29.0 | | |

[1012] The results in Table 63 above show that there were greater liver tissue levels of the oligonucleotides comprising a GalNAc₃ conjugate group than of the parent oligonucleotide that does not comprise a GalNAc₃ conjugate group (ISIS 353382) 72 hours following oligonucleotide administration, particularly when taking into consideration the differences in dosing between the oligonucleotides with and without a GalNAc₃ conjugate group. Furthermore, by 72 hours, 40-98% of each oligonucleotide comprising a GalNAc₃ conjugate group was metabolized to the parent compound, indicating that the GalNAc₃ conjugate groups were cleaved from the oligonucleotides.

### Example 76: Preparation of Oligomeric Compound 230 Comprising GalNAc₃-23

[chemical structure]

[chemical structure]

[1014] Compound 222 is commercially available. 44.48 ml (0.33 mol) of compound 222 was treated with tosyl chloride (25.39 g, 0.13 mol) in pyridine (500 mL) for 16 hours. The reaction was then evaporated to an oil, dissolved in EtOAc and washed with water, sat. NaHCO₃, brine, and dried over Na₂SO₄. The ethyl acetate was concentrated to dryness and purified by column chromatography, eluted with EtOAc/hexanes (1:1) followed by 10% methanol in CH₂Cl₂ to give compound 223 as a colorless oil. LCMS and NMR were consistent with the structure. 10 g (32.86 mmol) of 1-Tosyltriethylene glycol (compound 223) was treated with sodium azide (10.68 g, 164.28 mmol) in DMSO (100 mL) at room temperature for 17 hours. The reaction mixture was then poured onto water, and extracted with EtOAc. The organic layer was washed with water three times and dried over Na₂SO₄. The organic layer was concentrated to dryness to give 5.3 g of compound 224 (92%). LCMS and NMR were consistent with the structure. 1-Azidotriethylene glycol (compound 224, 5.53 g, 23.69 mmol) and compound 4 (6 g, 18.22 mmol) were treated with 4 A molecular sieves (5 g), and TMSOTf (1.65 ml, 9.11 mmol) in dichloromethane (100 mL) under an inert atmosphere. After 14 hours, the reaction was filtered to remove the sieves, and the organic layer was washed with sat. NaHCO₃, water, brine, and dried over Na₂SO₄. The organic layer was concentrated to dryness and purified by column chromatography, eluted with a gradient of 2 to 4% methanol in dichloromethane to give compound 225. LCMS and NMR were consistent with the structure. Compound 225 (11.9 g, 23.59 mmol) was hydrogenated in EtOAc/Methanol (4:1, 250 mL) over Pearlman's catalyst. After 8 hours, the catalyst was removed by filtration and the solvents removed to dryness to give compound 226. LCMS and NMR were consistent with the structure.

[1015] In order to generate compound 227, a solution of nitromethanetrispropionic acid (4.17 g, 15.04 mmol) and Hunig's base (10.3 ml, 60.17 mmol) in DMF (100 mL) were treated dropwise with pentaflourotrifluoro acetate (9.05 ml, 52.65 mmol). After 30 minutes, the reaction was poured onto ice water and extracted with EtOAc. The organic layer was washed with water, brine, and dried over Na₂SO₄. The organic layer was concentrated to dryness and then recrystallized from heptane to give compound 227 as a white solid. LCMS and NMR were consistent with the structure. Compound 227 (1.5 g, 1.93 mmol) and compound 226 (3.7 g, 7.74 mmol) were stirred at room temperature in acetonitrile (15 mL) for 2 hours. The reaction was then evaporated to dryness and purified by column chromatography, eluting with a gradient of 2 to 10% methanol in dichloromethane to give compound 228. LCMS and NMR were consistent with the structure. Compound 228 (1.7 g, 1.02 mmol) was treated with Raney Nickel (about 2 g wet) in ethanol (100 mL) in an atmosphere of hydrogen. After 12 hours, the catalyst was removed by filtration and the organic layer was evaporated to a solid that was used directly in the next step. LCMS and NMR were consistent with the structure. This solid (0.87 g, 0.53 mmol) was treated with benzylglutaric acid (0.18 g, 0.8 mmol), HBTU (0.3 g, 0.8 mmol) and DIEA (273.7 μl, 1.6 mmol) in DMF (5 mL). After 16 hours, the DMF was removed under reduced pressure at 65° C. to an oil, and the oil was dissolved in dichloromethane. The organic layer was washed with sat. NaHCO₃, brine, and dried over Na₂SO₄. After evaporation of the organic layer, the compound was purified by column chromatography and eluted with a gradient of 2 to 20% methanol in dichloromethane to give the coupled product. LCMS and NMR were consistent with the structure. The benzyl ester was deprotected with Pearlman's catalyst under a hydrogen atmosphere for 1 hour. The catalyst was them removed by filtration and the solvents removed to dryness to give the acid. LCMS and NMR were consistent with the structure. The acid (486 mg, 0.27 mmol) was dissolved in dry DMF (3 mL). Pyridine (53.61 μl, 0.66 mmol) was added and the reaction was purged with argon. Pentaflourotriflouro acetate (46.39 μl, 0.4 mmol) was slowly added to the reaction mixture. The color of the reaction changed from pale yellow to burgundy, and gave off a light smoke which was blown away with a stream of argon. The reaction was allowed to stir at room temperature for one hour (completion of reaction was confirmed by LCMS). The solvent was removed under reduced pressure (rotovap) at 70° C. The residue was diluted with DCM and washed with 1N NaHSO₄, brine, saturated sodium bicarbonate and brine again. The organics were dried over Na₂SO₄, filtered, and were concentrated to dryness to give 225 mg of compound 229 as a brittle yellow foam. LCMS and NMR were consistent with the structure.

[1016] Oligomeric compound 230, comprising a GalNAc₃-23 conjugate group, was prepared from compound 229 using the general procedure illustrated in Example 46. The GalNAc₃ cluster portion of the GalNAc₃-23 conjugate group (GalNAc₃-23ₐ) can be combined with any cleavable moiety to provide a variety of conjugate groups. The structure of GalNAc₃-23 (GalNAc₃-23ₐ-CM) is shown below:

[chemical structure]

### Example 77: Antisense Inhibition In Vivo by Oligonucleotides Targeting SRB-1 Comprising a GalNAc₃ Conjugate

[1017] The oligonucleotides listed below were tested in a dose-dependent study for antisense inhibition of SRB-1 in mice.

TABLE 64
Modified ASOs targeting SRB-1

| | | GalNAc₃ | | SEQ |
|---|---|---|---|---|
| ISIS No. | Sequences (5′ to 3′) | Cluster | CM | ID No. |
| 661161 | GalNAc₃-3ₐ-_{o′}A_{do}Gₑₛ^{m}CₑₛTₑₛTₑₛ^{m}CₑₛA_{ds}G_{ds}T_{ds}^{m}C_{ds}A_{ds}T_{ds} | GalNAc₃-3a | A_{d} | 2306 |
| | G_{ds}A_{ds}^{m}C_{ds}T_{ds}Tₑₛ^{m}Cₑₛ^{m}CₑₛTₑₛTₑ | | | |
| 666904 | GalNAc₃-3ₐ-_{o′}Gₑₛ^{m}CₑₛTₑₛTₑₛ^{m}CₑₛA_{ds}G_{ds}T_{ds}^{m}C_{ds}A_{ds}T_{ds} | GalNAc₃-3a | PO | 2304 |
| | G_{ds}A_{ds}^{m}C_{ds}T_{ds}Tₑₛ^{m}Cₑₛ^{m}CₑₛTₑₛTₑ | | | |
| 673502 | GalNAc₃-10ₐ-_{o′}A_{do}Gₑₛ^{m}CₑₒTₑₒTₑₒ^{m}CₑₒA_{ds}G_{ds}T_{ds}^{m}C_{ds}A_{ds}T_{ds} | GalNAc₃-10a | A_{d} | 2306 |
| | G_{ds}A_{ds}^{m}C_{ds}T_{ds}Tₑₒ^{m}Cₑₒ^{m}CₑₛTₑₛTₑ | | | |
| 677844 | GalNAc₃-9ₐ-_{o′}A_{do}Gₑₛ^{m}CₑₛTₑₛTₑₛ^{m}CₑₛA_{ds}G_{ds}T_{ds}^{m}C_{ds}A_{ds}T_{ds} | GalNAc₃-9a | A_{d} | 2306 |
| | G_{ds}A_{ds}^{m}C_{ds}T_{ds}Tₑₛ^{m}Cₑₛ^{m}CₑₛTₑₛTₑ | | | |
| 677843 | GalNAc₃-23ₐ-_{o′}A_{do}Gₑₛ^{m}CₑₛTₑₛTₑₛ^{m}CₑₛA_{ds}G_{ds}T_{ds}^{m}C_{ds}A_{ds}T_{ds} | GalNAc₃-23a | A_{d} | 2306 |
| | G_{ds}A_{ds}^{m}C_{ds}T_{ds}Tₑₛ^{m}Cₑₛ^{m}CₑₛTₑₛTₑ | | | |
| 655861 | Gₑₛ^{m}CₑₛTₑₛTₑₛ^{m}CₑₛA_{ds}G_{ds}T_{ds}^{m}C_{ds}A_{ds}T_{ds}G_{ds}A_{ds}^{m}C_{ds}T_{ds}Tₑₛ^{m}Cₑₛ | GalNAc₃-1a | A_{d} | 2305 |
| | ^{m}CₑₛTₑₛTₑₒA_{do′}-GalNAc₃-1ₐ | | | |
| 677841 | Gₑₛ^{m}CₑₛTₑₛTₑₛ^{m}CₑₛA_{ds}G_{ds}T_{ds}^{m}C_{ds}A_{ds}T_{ds}G_{ds}A_{ds}^{m}C_{ds}T_{ds}Tₑₛ^{m}Cₑₛ | GalNAc₃-19a | A_{d} | 2305 |
| | ^{m}CₑₛTₑₛTₑₒA_{do′}-GalNAc₃-19ₐ | | | |
| 677842 | Gₑₛ^{m}CₑₛTₑₛTₑₛ^{m}CₑₛA_{ds}G_{ds}T_{ds}^{m}C_{ds}A_{ds}T_{ds}G_{ds}A_{ds}^{m}C_{ds}T_{ds}Tₑₛ^{m}Cₑₛ | GalNAc₃-20a | A_{d} | 2305 |
| | ^{m}CₑₛTₑₛTₑₒA_{do′}-GalNAc₃-20ₐ | | | |

[1018] The structure of GalNAc₃-1ₐ was shown previously in Example 9, GalNAc₃-3ₐ was shown in Example 39, GalNAc₃-9a was shown in Example 52, GalNAc₃-10a was shown in Example 46, GalNAc₃-19ₐ was shown in Example 70, GalNAc₃-20ₐ was shown in Example 71, and GalNAc₃-23ₐ was shown in Example 76.

### Treatment

[1019] Six to eight week old C57BL/6 mice (Jackson Laboratory, Bar Harbor, Me.) were each injected subcutaneously once at a dosage shown below with an oligonucleotide listed in Table 64 or with saline. Each treatment group consisted of 4 animals. The mice were sacrificed 72 hours following the final administration to determine the SRB-1 mRNA levels using real-time PCR and RIBOGREEN® RNA quantification reagent (Molecular Probes, Inc. Eugene, Oreg.) according to standard protocols. The results below are presented as the average percent of SRB-1 mRNA levels for each treatment group, normalized to the saline control.

[1020] As illustrated in Table 65, treatment with antisense oligonucleotides lowered SRB-1 mRNA levels in a dose-dependent manner

TABLE 65
SRB-1 mRNA (% Saline)

| | Dosage | SRB-1 mRNA | GalNAc₃ | |
|---|---|---|---|---|
| ISIS No. | (mg/kg) | (% Saline) | Cluster | CM |
| Saline | n/a | 100.0 | n/a | n/a |
| 661161 | 0.5 | 89.18 | GalNAc₃-3a | A_{d} |
| | 1.5 | 77.02 | | |
| | 5 | 29.10 | | |
| | 15 | 12.64 | | |
| 666904 | 0.5 | 93.11 | GalNAc₃-3a | PO |
| | 1.5 | 55.85 | | |
| | 5 | 21.29 | | |
| | 15 | 13.43 | | |
| 673502 | 0.5 | 77.75 | GalNAc₃-10a | A_{d} |
| | 1.5 | 41.05 | | |
| | 5 | 19.27 | | |
| | 15 | 14.41 | | |
| 677844 | 0.5 | 87.65 | GalNAc₃-9a | A_{d} |
| | 1.5 | 93.04 | | |
| | 5 | 40.77 | | |
| | 15 | 16.95 | | |
| 677843 | 0.5 | 102.28 | GalNAc₃-23a | A_{d} |
| | 1.5 | 70.51 | | |
| | 5 | 30.68 | | |
| | 15 | 13.26 | | |
| 655861 | 0.5 | 79.72 | GalNAc₃-1a | A_{d} |
| | 1.5 | 55.48 | | |
| | 5 | 26.99 | | |
| | 15 | 17.58 | | |
| 677841 | 0.5 | 67.43 | GalNAc₃-19a | A_{d} |
| | 1.5 | 45.13 | | |
| | 5 | 27.02 | | |
| | 15 | 12.41 | | |
| 677842 | 0.5 | 64.13 | GalNAc₃-20a | A_{d} |
| | 1.5 | 53.56 | | |
| | 5 | 20.47 | | |
| | 15 | 10.23 | | |

[1021] Liver transaminase levels, alanine aminotransferase (ALT) and aspartate aminotransferase (AST), in serum were also measured using standard protocols. Total bilirubin and BUN were also evaluated. Changes in body weights were evaluated, with no significant change from the saline group (data not shown). ALTs, ASTs, total bilirubin and BUN values are shown in Table 66 below.

TABLE 66

| | | | | Total | | | |
|---|---|---|---|---|---|---|---|
| | Dosage | | AST | Bilirubin | BUN | GalNAc₃ | |
| ISIS No. | (mg/kg) | ALT (U/L) | (U/L) | (mg/dL) | (mg/dL) | Cluster | CM |
| Saline | n/a | 21 | 45 | 0.13 | 34 | n/a | n/a |
| 661161 | 0.5 | 28 | 51 | 0.14 | 39 | GalNAc₃-3a | A_{d} |
| | 1.5 | 23 | 42 | 0.13 | 39 | | |
| | 5 | 22 | 59 | 0.13 | 37 | | |
| | 15 | 21 | 56 | 0.15 | 35 | | |
| 666904 | 0.5 | 24 | 56 | 0.14 | 37 | GalNAc₃-3a | PO |
| | 1.5 | 26 | 68 | 0.15 | 35 | | |
| | 5 | 23 | 77 | 0.14 | 34 | | |
| | 15 | 24 | 60 | 0.13 | 35 | | |
| 673502 | 0.5 | 24 | 59 | 0.16 | 34 | GalNAc₃-10a | A_{d} |
| | 1.5 | 20 | 46 | 0.17 | 32 | | |
| | 5 | 24 | 45 | 0.12 | 31 | | |
| | 15 | 24 | 47 | 0.13 | 34 | | |
| 677844 | 0.5 | 25 | 61 | 0.14 | 37 | GalNAc₃-9a | A_{d} |
| | 1.5 | 23 | 64 | 0.17 | 33 | | |
| | 5 | 25 | 58 | 0.13 | 35 | | |
| | 15 | 22 | 65 | 0.14 | 34 | | |
| 677843 | 0.5 | 53 | 53 | 0.13 | 35 | GalNAc₃-23a | A_{d} |
| | 1.5 | 25 | 54 | 0.13 | 34 | | |
| | 5 | 21 | 60 | 0.15 | 34 | | |
| | 15 | 22 | 43 | 0.12 | 38 | | |
| 655861 | 0.5 | 21 | 48 | 0.15 | 33 | GalNAc₃-1a | A_{d} |
| | 1.5 | 28 | 54 | 0.12 | 35 | | |
| | 5 | 22 | 60 | 0.13 | 36 | | |
| | 15 | 21 | 55 | 0.17 | 30 | | |
| 677841 | 0.5 | 32 | 54 | 0.13 | 34 | GalNAc₃-19a | A_{d} |
| | 1.5 | 24 | 56 | 0.14 | 34 | | |
| | 5 | 23 | 92 | 0.18 | 31 | | |
| | 15 | 24 | 58 | 0.15 | 31 | | |
| 677842 | 0.5 | 23 | 61 | 0.15 | 35 | GalNAc₃-20a | A_{d} |
| | 1.5 | 24 | 57 | 0.14 | 34 | | |
| | 5 | 41 | 62 | 0.15 | 35 | | |
| | 15 | 24 | 37 | 0.14 | 32 | | |

### Example 78: Antisense Inhibition In Vivo by Oligonucleotides Targeting Angiotensinogen Comprising a GalNAc₃ Conjugate

[1022] The oligonucleotides listed below were tested in a dose-dependent study for antisense inhibition of Angiotensinogen (AGT) in normotensive Sprague Dawley rats.

TABLE 67
Modified ASOs targeting AGT

| ISIS | | GalNAc₃ | | SEQ |
|---|---|---|---|---|
| No. | Sequences (5′ to 3′) | Cluster | CM | ID No. |
| 552668 | ^{m}CₑₛAₑₛ^{m}CₑₛTₑₛGₑₛA_{ds}T_{ds}T_{ds}T_{ds}T_{ds}T_{ds}G_{ds}^{m}C_{ds}^{m}C_{ds}^{m}C_{ds}AₑₛGₑₛ | n/a | n/a | 2310 |
| | GₑₛAₑₛTₑ | | | |
| 669509 | ^{m}CₑₛAₑₛ^{m}CₑₛTₑₛGₑₛA_{ds}T_{ds}T_{ds}T_{ds}T_{ds}T_{ds}G_{ds}^{m}C_{ds}^{m}C_{ds}^{m}C_{ds}AₑₛGₑₛ | GalNAc₃-1ₐ | A_{d} | 2311 |
| | GₑₛAₑₛTₑₒA_{do′}-GalNAc₃-1ₐ | | | |

[1023] The structure of GalNAc₃-1ₐ was shown previously in Example 9.

### Treatment

[1024] Six week old, male Sprague Dawley rats were each injected subcutaneously once per week at a dosage shown below, for a total of three doses, with an oligonucleotide listed in Table 67 or with PBS. Each treatment group consisted of 4 animals. The rats were sacrificed 72 hours following the final dose. AGT liver mRNA levels were measured using real-time PCR and RIBOGREEN® RNA quantification reagent (Molecular Probes, Inc. Eugene, Oreg.) according to standard protocols. AGT plasma protein levels were measured using the Total Angiotensinogen ELISA (Catalog # JP27412, IBL International, Toronto, ON) with plasma diluted 1:20,000. The results below are presented as the average percent of AGT mRNA levels in liver or AGT protein levels in plasma for each treatment group, normalized to the PBS control.

[1025] As illustrated in Table 68, treatment with antisense oligonucleotides lowered AGT liver mRNA and plasma protein levels in a dose-dependent manner, and the oligonucleotide comprising a GalNAc conjugate was significantly more potent than the parent oligonucleotide lacking a GalNAc conjugate.

TABLE 68
AGT liver mRNA and plasma protein levels

| ISIS | Dosage | AGT liver mRNA | AGT plasma | GalNAc₃ | |
|---|---|---|---|---|---|
| No. | (mg/kg) | (% PBS) | protein (% PBS) | Cluster | CM |
| PBS | n/a | 100 | 100 | n/a | n/a |
| 552668 | 3 | 95 | 122 | n/a | n/a |
| | 10 | 85 | 97 | | |
| | 30 | 46 | 79 | | |
| | 90 | 8 | 11 | | |
| 669509 | 0.3 | 95 | 70 | GalNAc₃-1a | A_{d} |
| | 1 | 95 | 129 | | |
| | 3 | 62 | 97 | | |
| | 10 | 9 | 23 | | |

[1026] Liver transaminase levels, alanine aminotransferase (ALT) and aspartate aminotransferase (AST), in plasma and body weights were also measured at time of sacrifice using standard protocols. The results are shown in Table 69 below.

TABLE 69
Liver transaminase levels and rat body weights

| | | | | Body | | |
|---|---|---|---|---|---|---|
| | | | | Weight | | |
| ISIS | Dosage | ALT | AST | (% of | GalNAc₃ | |
| No. | (mg/kg) | (U/L) | (U/L) | baseline) | Cluster | CM |
| PBS | n/a | 51 | 81 | 186 | n/a | n/a |
| 552668 | 3 | 54 | 93 | 183 | n/a | n/a |
| | 10 | 51 | 93 | 194 | | |
| | 30 | 59 | 99 | 182 | | |
| | 90 | 56 | 78 | 170 | | |
| 669509 | 0.3 | 53 | 90 | 190 | GalNAc₃-1a | A_{d} |
| | 1 | 51 | 93 | 192 | | |
| | 3 | 48 | 85 | 189 | | |
| | 10 | 56 | 95 | 189 | | |

### Example 79: Duration of Action In Vivo of Oligonucleotides Targeting APOC-III Comprising a GalNAc₃ Conjugate

[1027] The oligonucleotides listed in Table 70 below were tested in a single dose study for duration of action in mice.

TABLE 70
Modified ASOs targeting APOC-III

| ISIS | | GalNAc₃ | | SEQ |
|---|---|---|---|---|
| No. | Sequences (5′ to 3′) | Cluster | CM | ID No. |
| 304801 | AₑₛGₑₛ^{m}CₑₛTₑₛTₑₛ^{m}C_{ds}T_{ds}T_{ds}G_{ds}T_{ds}^{m}C_{ds}^{m}C_{ds}A_{ds}G_{ds}^{m}C_{ds}TₑₛTₑₛ | n/a | n/a | 2296 |
| | TₑₛAₑₛTₑ | | | |
| 647535 | AₑₛGₑₛ^{m}CₑₛTₑₛTₑₛ^{m}C_{ds}T_{ds}T_{ds}G_{ds}T_{ds}^{m}C_{ds}^{m}C_{ds}A_{ds}G_{ds}^{m}C_{ds}TₑₛTₑₛ | GalNAc₃-1a | A_{d} | 2297 |
| | TₑₛAₑₛTₑₒA_{do′}-GalNAc₃-1ₐ | | | |
| 663083 | GalNAc₃-3ₐ-_{o′}A_{do}AₑₛGₑₛ^{m}CₑₛTₑₛTₑₛ^{m}C_{ds}T_{ds}T_{ds}G_{ds}T_{ds}^{m}C_{ds} | GalNAc₃-3a | A_{d} | 2312 |
| | ^{m}C_{ds}A_{ds}G_{ds}^{m}C_{ds}TₑₛTₑₛTₑₛAₑₛTₑ | | | |
| 674449 | GalNAc₃-7ₐ-_{o′}A_{do}AₑₛGₑₛ^{m}CₑₛTₑₛTₑₛ^{m}C_{ds}T_{ds}T_{ds}G_{ds}T_{ds}^{m}C_{ds} | GalNAc₃-7a | A_{d} | 2312 |
| | ^{m}C_{ds}A_{ds}G_{ds}^{m}C_{ds}TₑₛTₑₛTₑₛAₑₛTₑ | | | |
| 674450 | GalNAc₃-10ₐ-_{o′}A_{do}AₑₛGₑₛ^{m}CₑₛTₑₛTₑₛ^{m}C_{ds}T_{ds}T_{ds}G_{ds}T_{ds}^{m}C_{ds} | GalNAc₃-10a | A_{d} | 2312 |
| | ^{m}C_{ds}A_{ds}G_{ds}^{m}C_{ds}TₑₛTₑₛTₑₛAₑₛTₑ | | | |
| 674451 | GalNAc₃-13ₐ-_{o′}A_{do}AₑₛGₑₛ^{m}CₑₛTₑₛTₑₛ^{m}C_{ds}T_{ds}T_{ds}G_{ds}T_{ds}^{m}C_{ds} | GalNAc₃-13a | A_{d} | 2312 |
| | ^{m}C_{ds}A_{ds}G_{ds}^{m}C_{ds}TₑₛTₑₛTₑₛAₑₛTₑ | | | |

[1028] The structure of GalNAc₃-1ₐ was shown previously in Example 9, GalNAc₃-3ₐ was shown in Example 39, GalNAc₃-7ₐ was shown in Example 48, GalNAc₃-10ₐ was shown in Example 46, and GalNAc₃-13ₐ was shown in Example 62.

### Treatment

[1029] Six to eight week old transgenic mice that express human APOC-III were each injected subcutaneously once with an oligonucleotide listed in Table 70 or with PBS. Each treatment group consisted of 3 animals. Blood was drawn before dosing to determine baseline and at 72 hours, 1 week, 2 weeks, 3 weeks, 4 weeks, 5 weeks, and 6 weeks following the dose. Plasma triglyceride and APOC-III protein levels were measured as described in Example 20. The results below are presented as the average percent of plasma triglyceride and APOC-III levels for each treatment group, normalized to baseline levels, showing that the oligonucleotides comprising a GalNAc conjugate group exhibited a longer duration of action than the parent oligonucleotide without a conjugate group (ISIS 304801) even though the dosage of the parent was three times the dosage of the oligonucleotides comprising a GalNAc conjugate group.

TABLE 71
Plasma triglyceride and APOC-III protein levels in transgenic mice

| | | Time point | | APOC-III | | |
|---|---|---|---|---|---|---|
| ISIS | Dosage | (days post- | Triglycerides | protein (% | GalNAc₃ | |
| No. | (mg/kg) | dose) | (% baseline) | baseline) | Cluster | CM |
| PBS | n/a | 3 | 97 | 102 | n/a | n/a |
| | | 7 | 101 | 98 | | |
| | | 14 | 108 | 98 | | |
| | | 21 | 107 | 107 | | |
| | | 28 | 94 | 91 | | |
| | | 35 | 88 | 90 | | |
| | | 42 | 91 | 105 | | |
| 304801 | 30 | 3 | 40 | 34 | n/a | n/a |
| | | 7 | 41 | 37 | | |
| | | 14 | 50 | 57 | | |
| | | 21 | 50 | 50 | | |
| | | 28 | 57 | 73 | | |
| | | 35 | 68 | 70 | | |
| | | 42 | 75 | 93 | | |
| 647535 | 10 | 3 | 36 | 37 | GalNAc₃-1a | A_{d} |
| | | 7 | 39 | 47 | | |
| | | 14 | 40 | 45 | | |
| | | 21 | 41 | 41 | | |
| | | 28 | 42 | 62 | | |
| | | 35 | 69 | 69 | | |
| | | 42 | 85 | 102 | | |
| 663083 | 10 | 3 | 24 | 18 | GalNAc₃-3a | A_{d} |
| | | 7 | 28 | 23 | | |
| | | 14 | 25 | 27 | | |
| | | 21 | 28 | 28 | | |
| | | 28 | 37 | 44 | | |
| | | 35 | 55 | 57 | | |
| | | 42 | 60 | 78 | | |
| 674449 | 10 | 3 | 29 | 26 | GalNAc₃-7a | A_{d} |
| | | 7 | 32 | 31 | | |
| | | 14 | 38 | 41 | | |
| | | 21 | 44 | 44 | | |
| | | 28 | 53 | 63 | | |
| | | 35 | 69 | 77 | | |
| | | 42 | 78 | 99 | | |
| 674450 | 10 | 3 | 33 | 30 | GalNAc₃-10a | A_{d} |
| | | 7 | 35 | 34 | | |
| | | 14 | 31 | 34 | | |
| | | 21 | 44 | 44 | | |
| | | 28 | 56 | 61 | | |
| | | 35 | 68 | 70 | | |
| | | 42 | 83 | 95 | | |
| 674451 | 10 | 3 | 35 | 33 | GalNAc₃-13a | A_{d} |
| | | 7 | 24 | 32 | | |
| | | 14 | 40 | 34 | | |
| | | 21 | 48 | 48 | | |
| | | 28 | 54 | 67 | | |
| | | 35 | 65 | 75 | | |
| | | 42 | 74 | 97 | | |

### Example 80: Antisense Inhibition In Vivo by Oligonucleotides Targeting Alpha-1 Antitrypsin (A1AT) Comprising a GalNAc₃ Conjugate

[1030] The oligonucleotides listed in Table 72 below were tested in a study for dose-dependent inhibition of A1AT in mice.

TABLE 72
Modified ASOs targeting A1AT

| ISIS | | GalNAc₃ | | SEQ ID |
|---|---|---|---|---|
| No. | Sequences (5′ to 3′) | Cluster | CM | No. |
| 476366 | Aₑₛ^{m}Cₑₛ^{m}Cₑₛ^{m}CₑₛAₑₛA_{ds}T_{ds}T_{ds}^{m}C_{ds}A_{ds}G_{ds}A_{ds}A_{ds}G_{ds}G_{ds}AₑₛAₑₛ | n/a | n/a | 2313 |
| | GₑₛGₑₛAₑ | | | |
| 656326 | Aₑₛ^{m}Cₑₛ^{m}Cₑₛ^{m}CₑₛAₑₛA_{ds}T_{ds}T_{ds}^{m}C_{ds}A_{ds}G_{ds}A_{ds}A_{ds}G_{ds}G_{ds}AₑₛAₑₛ | GalNAc₃-1a | A_{d} | 2314 |
| | GₑₛGₑₛAₑₒA_{do′}-GalNAc₃-1ₐ | | | |
| 678381 | GalNAc₃-3ₐ-_{o′}A_{do}Aₑₛ^{m}Cₑₛ^{m}Cₑₛ^{m}CₑₛAₑₛA_{ds}T_{ds}T_{ds}^{m}C_{ds}A_{ds}G_{ds}A_{ds} | GalNAc₃-3a | A_{d} | 2315 |
| | A_{ds}G_{ds}G_{ds}AₑₛAₑₛGₑₛGₑₛAₑ | | | |
| 678382 | GalNAc₃-7ₐ-_{o′}A_{do}Aₑₛ^{m}Cₑₛ^{m}Cₑₛ^{m}CₑₛAₑₛA_{ds}T_{ds}T_{ds}^{m}C_{ds}A_{ds}G_{ds}A_{ds} | GalNAc₃-7a | A_{d} | 2315 |
| | A_{ds}G_{ds}G_{ds}AₑₛAₑₛGₑₛGₑₛAₑ | | | |
| 678383 | GalNAc₃-10ₐ-_{o′}A_{do}Aₑₛ^{m}Cₑₛ^{m}Cₑₛ^{m}CₑₛAₑₛA_{ds}T_{ds}T_{ds}^{m}C_{ds}A_{ds}G_{ds} | GalNAc₃-10a | A_{d} | 2315 |
| | A_{ds}A_{ds}G_{ds}G_{ds}AₑₛAₑₛGₑₛGₑₛAₑ | | | |
| 678384 | GalNAc₃-13ₐ-_{o′}A_{do}Aₑₛ^{m}Cₑₛ^{m}Cₑₛ^{m}CₑₛAₑₛA_{ds}T_{ds}T_{ds}^{m}C_{ds}A_{ds}G_{ds} | GalNAc₃-13a | A_{d} | 2315 |
| | A_{ds}A_{ds}G_{ds}G_{ds}AₑₛAₑₛGₑₛGₑₛAₑ | | | |

[1031] The structure of GalNAc₃-1ₐ was shown previously in Example 9, GalNAc₃-3ₐ was shown in Example 39, GalNAc₃-7ₐ was shown in Example 48, GalNAc₃-10ₐ was shown in Example 46, and GalNAc₃-13ₐ was shown in Example 62.

### Treatment

[1032] Six week old, male C57BL/6 mice (Jackson Laboratory, Bar Harbor, Me.) were each injected subcutaneously once per week at a dosage shown below, for a total of three doses, with an oligonucleotide listed in Table 72 or with PBS. Each treatment group consisted of 4 animals. The mice were sacrificed 72 hours following the final administration. A1AT liver mRNA levels were determined using real-time PCR and RIBOGREEN® RNA quantification reagent (Molecular Probes, Inc. Eugene, Oreg.) according to standard protocols. A1AT plasma protein levels were determined using the Mouse Alpha 1-Antitrypsin ELISA (catalog #41-A1AMS-E01, Alpco, Salem, N.H.). The results below are presented as the average percent of A1AT liver mRNA and plasma protein levels for each treatment group, normalized to the PBS control.

[1033] As illustrated in Table 73, treatment with antisense oligonucleotides lowered A1AT liver mRNA and A1AT plasma protein levels in a dose-dependent manner. The oligonucleotides comprising a GalNAc conjugate were significantly more potent than the parent (ISIS 476366).

TABLE 73
A1AT liver mRNA and plasma protein levels

| | | | A1AT | | |
|---|---|---|---|---|---|
| | | A1AT liver | plasma | | |
| ISIS | Dosage | mRNA | protein | GalNAc₃ | |
| No. | (mg/kg) | (% PBS) | (% PBS) | Cluster | CM |
| PBS | n/a | 100 | 100 | n/a | n/a |
| 476366 | 5 | 86 | 78 | n/a | n/a |
| | 15 | 73 | 61 | | |
| | 45 | 30 | 38 | | |
| 656326 | 0.6 | 99 | 90 | GalNAc₃-1a | A_{d} |
| | 2 | 61 | 70 | | |
| | 6 | 15 | 30 | | |
| | 18 | 6 | 10 | | |
| 678381 | 0.6 | 105 | 90 | GalNAc₃-3a | A_{d} |
| | 2 | 53 | 60 | | |
| | 6 | 16 | 20 | | |
| | 18 | 7 | 13 | | |
| 678382 | 0.6 | 90 | 79 | GalNAc₃-7a | A_{d} |
| | 2 | 49 | 57 | | |
| | 6 | 21 | 27 | | |
| | 18 | 8 | 11 | | |
| 678383 | 0.6 | 94 | 84 | GalNAc₃-10a | A_{d} |
| | 2 | 44 | 53 | | |
| | 6 | 13 | 24 | | |
| | 18 | 6 | 10 | | |
| 678384 | 0.6 | 106 | 91 | GalNAc₃-13a | A_{d} |
| | 2 | 65 | 59 | | |
| | 6 | 26 | 31 | | |
| | 18 | 11 | 15 | | |

[1034] Liver transaminase and BUN levels in plasma were measured at time of sacrifice using standard protocols. Body weights and organ weights were also measured. The results are shown in Table 74 below. Body weight is shown as % relative to baseline. Organ weights are shown as % of body weight relative to the PBS control group.

TABLE 74

| | | | | | Body | Liver | Kidney | Spleen |
|---|---|---|---|---|---|---|---|---|
| ISIS | Dosage | ALT | AST | BUN | weight (% | weight (Rel | weight (Rel | weight (Rel |
| No. | (mg/kg) | (U/L) | (U/L) | (mg/dL) | baseline) | % BW) | % BW) | % BW) |
| PBS | n/a | 25 | 51 | 37 | 119 | 100 | 100 | 100 |
| 476366 | 5 | 34 | 68 | 35 | 116 | 91 | 98 | 106 |
| | 15 | 37 | 74 | 30 | 122 | 92 | 101 | 128 |
| | 45 | 30 | 47 | 31 | 118 | 99 | 108 | 123 |
| 656326 | 0.6 | 29 | 57 | 40 | 123 | 100 | 103 | 119 |
| | 2 | 36 | 75 | 39 | 114 | 98 | 111 | 106 |
| | 6 | 32 | 67 | 39 | 125 | 99 | 97 | 122 |
| | 18 | 46 | 77 | 36 | 116 | 102 | 109 | 101 |
| 678381 | 0.6 | 26 | 57 | 32 | 117 | 93 | 109 | 110 |
| | 2 | 26 | 52 | 33 | 121 | 96 | 106 | 125 |
| | 6 | 40 | 78 | 32 | 124 | 92 | 106 | 126 |
| | 18 | 31 | 54 | 28 | 118 | 94 | 103 | 120 |
| 678382 | 0.6 | 26 | 42 | 35 | 114 | 100 | 103 | 103 |
| | 2 | 25 | 50 | 31 | 117 | 91 | 104 | 117 |
| | 6 | 30 | 79 | 29 | 117 | 89 | 102 | 107 |
| | 18 | 65 | 112 | 31 | 120 | 89 | 104 | 113 |
| 678383 | 0.6 | 30 | 67 | 38 | 121 | 91 | 100 | 123 |
| | 2 | 33 | 53 | 33 | 118 | 98 | 102 | 121 |
| | 6 | 32 | 63 | 32 | 117 | 97 | 105 | 105 |
| | 18 | 36 | 68 | 31 | 118 | 99 | 103 | 108 |
| 678384 | 0.6 | 36 | 63 | 31 | 118 | 98 | 103 | 98 |
| | 2 | 32 | 61 | 32 | 119 | 93 | 102 | 114 |
| | 6 | 34 | 69 | 34 | 122 | 100 | 100 | 96 |
| | 18 | 28 | 54 | 30 | 117 | 98 | 101 | 104 |

### Example 81: Duration of Action In Vivo of Oligonucleotides Targeting A1AT Comprising a GalNAc₃ Conjugate

[1035] The oligonucleotides listed in Table 72 were tested in a single dose study for duration of action in mice.

### Treatment

[1036] Six week old, male C57BL/6 mice were each injected subcutaneously once with an oligonucleotide listed in Table 72 or with PBS. Each treatment group consisted of 4 animals. Blood was drawn the day before dosing to determine baseline and at 5, 12, 19, and 25 days following the dose. Plasma A1AT protein levels were measured via ELISA (see Example 80). The results below are presented as the average percent of plasma A1AT protein levels for each treatment group, normalized to baseline levels. The results show that the oligonucleotides comprising a GalNAc conjugate were more potent and had longer duration of action than the parent lacking a GalNAc conjugate (ISIS 476366). Furthermore, the oligonucleotides comprising a 5′-GalNAc conjugate (ISIS 678381, 678382, 678383, and 678384) were generally even more potent with even longer duration of action than the oligonucleotide comprising a 3′-GalNAc conjugate (ISIS 656326).

TABLE 75
Plasma A1AT protein levels in mice

| | | Time point | | | |
|---|---|---|---|---|---|
| ISIS | Dosage | (days post- | A1AT (% | GalNAc₃ | |
| No. | (mg/kg) | dose) | baseline) | Cluster | CM |
| PBS | n/a | 5 | 93 | n/a | n/a |
| | | 12 | 93 | | |
| | | 19 | 90 | | |
| | | 25 | 97 | | |
| 476366 | 100 | 5 | 38 | n/a | n/a |
| | | 12 | 46 | | |
| | | 19 | 62 | | |
| | | 25 | 77 | | |
| 656326 | 18 | 5 | 33 | GalNAc₃-1a | A_{d} |
| | | 12 | 36 | | |
| | | 19 | 51 | | |
| | | 25 | 72 | | |
| 678381 | 18 | 5 | 21 | GalNAc₃-3a | A_{d} |
| | | 12 | 21 | | |
| | | 19 | 35 | | |
| | | 25 | 48 | | |
| 678382 | 18 | 5 | 21 | GalNAc₃-7a | A_{d} |
| | | 12 | 21 | | |
| | | 19 | 39 | | |
| | | 25 | 60 | | |
| 678383 | 18 | 5 | 24 | GalNAc₃-10a | A_{d} |
| | | 12 | 21 | | |
| | | 19 | 45 | | |
| | | 25 | 73 | | |
| 678384 | 18 | 5 | 29 | GalNAc₃-13a | A_{d} |
| | | 12 | 34 | | |
| | | 19 | 57 | | |
| | | 25 | 76 | | |

### Example 82: Antisense Inhibition In Vitro by Oligonucleotides Targeting SRB-1 Comprising a GalNAc₃ Conjugate

[1037] Primary mouse liver hepatocytes were seeded in 96 well plates at 15,000 cells/well 2 hours prior to treatment. The oligonucleotides listed in Table 76 were added at 2, 10, 50, or 250 nM in Williams E medium and cells were incubated overnight at 37° C. in 5% CO₂. Cells were lysed 16 hours following oligonucleotide addition, and total RNA was purified using RNease 3000 BioRobot (Qiagen). SRB-1 mRNA levels were determined using real-time PCR and RIBOGREEN® RNA quantification reagent (Molecular Probes, Inc. Eugene, Oreg.) according to standard protocols. IC₅₀ values were determined using Prism 4 software (GraphPad). The results show that oligonucleotides comprising a variety of different GalNAc conjugate groups and a variety of different cleavable moieties are significantly more potent in an in vitro free uptake experiment than the parent oligonucleotides lacking a GalNAc conjugate group (ISIS 353382 and 666841).

TABLE 76
Inhibition of SRB-1 expression in vitro

| ISIS | | | GalNAc | | IC₅₀ | SEQ |
|---|---|---|---|---|---|---|
| No. | Sequence (5′ to 3′) | Linkages | cluster | CM | (nM) | ID No. |
| 353382 | Gₑₛ^{m}CₑₛTₑₛTₑₛ^{m}CₑₛA_{ds}G_{ds}T_{ds}^{m}C_{ds}A_{ds}T_{ds}G_{ds}A_{ds} | PS | n/a | n/a | 250 | 2304 |
| | ^{m}C_{ds}T_{ds}Tₑₛ^{m}Cₑₛ^{m}CₑₛTₑₛTₑ | | | | | |
| 655861 | Gₑₛ^{m}CₑₛTₑₛTₑₛ^{m}CₑₛA_{ds}G_{ds}T_{ds}^{m}C_{ds}A_{ds}T_{ds}G_{ds}A_{ds} | PS | GalNAc₃- | A_{d} | 40 | 2305 |
| | ^{m}C_{ds}T_{ds}Tₑₛ^{m}Cₑₛ^{m}CₑₛTₑₛTₑₒA_{do′}-GalNAc₃-1ₐ | | 1ₐ | | | |
| 661161 | GalNAc₃-3ₐ-_{o′}A_{do}Gₑₛ^{m}CₑₛTₑₛTₑₛ^{m}CₑₛA_{ds}G_{ds}T_{ds} | PS | GalNAc₃- | A_{d} | 40 | 2306 |
| | ^{m}C_{ds}A_{ds}T_{ds}G_{ds}A_{ds}^{m}C_{ds}T_{ds}Tₑₛ^{m}Cₑₛ^{m}CₑₛTₑₛTₑ | | 3ₐ | | | |
| 661162 | GalNAc₃-3ₐ-_{o′}A_{do}Gₑₛ^{m}CₑₒTₑₒTₑₒ^{m}CₑₒA_{ds}G_{ds}T_{ds} | PO/PS | GalNAc₃- | A_{d} | 8 | 2306 |
| | ^{m}C_{ds}A_{ds}T_{ds}G_{ds}A_{ds}^{m}C_{ds}T_{ds} Tₑₒ^{m}Cₑₒ^{m}CₑₛTₑₛTₑ | | 3ₐ | | | |
| 664078 | Gₑₛ^{m}CₑₛTₑₛTₑₛ^{m}CₑₛA_{ds}G_{ds}T_{ds}^{m}C_{ds}A_{ds}T_{ds}G_{ds}A_{ds} | PS | GalNAc₃- | A_{d} | 20 | 2305 |
| | ^{m}C_{ds}T_{ds}Tₑₛ^{m}Cₑₛ^{m}CₑₛTₑₛTₑₒA_{do′}-GalNAc₃-9ₐ | | 9ₐ | | | |
| 665001 | GalNAc₃-8ₐ-_{o′}A_{do}Gₑₛ^{m}CₑₛTₑₛTₑₛ^{m}CₑₛA_{ds}G_{ds}T_{ds} | PS | GalNAc₃- | A_{d} | 70 | 2306 |
| | ^{m}C_{ds}-A_{ds}T_{ds}G_{ds}A_{ds}^{m}C_{ds}T_{ds}Tₑₛ^{m}Cₑₛ^{m}CₑₛTₑₛTₑ | | 8ₐ | | | |
| 666224 | GalNAc₃-5ₐ-_{o′}A_{do}Gₑₛ^{m}CₑₛTₑₛTₑₛ^{m}CₑₛA_{ds}G_{ds}T_{ds} | PS | GalNAc₃- | A_{d} | 80 | 2306 |
| | ^{m}C_{ds}A_{ds}T_{ds}G_{ds}A_{ds}^{m}C_{ds}T_{ds}Tₑₛ^{m}Cₑₛ^{m}CₑₛTₑₛTₑ | | 5ₐ | | | |
| 666841 | Gₑₛ^{m}CₑₒTₑₒTₑₒ^{m}CₑₛA_{ds}G_{ds}T_{ds}^{m}C_{ds}A_{ds}T_{ds}G_{ds}A_{ds} | PO/PS | n/a | n/a | >250 | 2304 |
| | ^{m}C_{ds}T_{ds} Tₑₒ^{m}Cₑₒ^{m}CₑₛTₑₛTₑ | | | | | |
| 666881 | GalNAc₃-10ₐ-_{o′}A_{do}Gₑₛ^{m}CₑₛTₑₛTₑₛ^{m}CₑₛA_{ds}G_{ds}T_{ds} | PS | GalNAc₃- | A_{d} | 30 | 2306 |
| | ^{m}C_{ds}A_{ds}T_{ds}G_{ds}A_{ds}^{m}C_{ds}T_{ds}Tₑₛ^{m}Cₑₛ^{m}CₑₛTₑₛTₑ | | 10ₐ | | | |
| 666904 | GalNAc₃-3ₐ-_{o′}Gₑₛ^{m}CₑₛTₑₛTₑₛ^{m}CₑₛA_{ds}G_{ds}T_{ds}^{m}C_{ds} | PS | GalNAc₃- | PO | 9 | 2304 |
| | A_{ds}T_{ds}G_{ds}A_{ds}^{m}C_{ds}T_{ds} Tₑₛ^{m}Cₑₛ^{m}CₑₛTₑₛTₑ | | 3ₐ | | | |
| 666924 | GalNAc₃-3ₐ-_{o′}T_{do}Gₑₛ^{m}CₑₛTₑₛTₑₛ^{m}CₑₛA_{ds}G_{ds}T_{ds} | PS | GalNAc₃- | T_{d} | 15 | 2309 |
| | ^{m}C_{ds}A_{ds}T_{ds}G_{ds}A_{ds}^{m}C_{ds}T_{ds} Tₑₛ^{m}Cₑₛ^{m}CₑₛTₑₛTₑ | | 3ₐ | | | |
| 666961 | GalNAc₃-6ₐ-_{o′}A_{do}Gₑₛ^{m}CₑₛTₑₛTₑₛ^{m}CₑₛA_{ds}G_{ds}T_{ds} | PS | GalNAc₃- | A_{d} | 150 | 2306 |
| | ^{m}C_{ds}A_{ds}T_{ds}G_{ds}A_{ds}^{m}C_{ds}T_{ds}Tₑₛ^{m}Cₑₛ^{m}CₑₛTₑₛTₑ | | 6ₐ | | | |
| 666981 | GalNAc₃-7ₐ-_{o′}A_{do}Gₑₛ^{m}CₑₛTₑₛTₑₛ^{m}CₑₛA_{ds}G_{ds}T_{ds} | PS | GalNAc₃- | A_{d} | 20 | 2306 |
| | ^{m}C_{ds}A_{ds}T_{ds}G_{ds}A_{ds}^{m}C_{ds}T_{ds}Tₑₛ^{m}Cₑₛ^{m}CₑₛTₑₛTₑ | | 7ₐ | | | |
| 670061 | GalNAc₃-13ₐ-_{o′}A_{do}Gₑₛ^{m}CₑₛTₑₛTₑₛ^{m}CₑₛA_{ds}G_{ds}T_{ds} | PS | GalNAc₃- | A_{d} | 30 | 2306 |
| | ^{m}C_{ds}A_{ds}T_{ds}G_{ds}A_{ds}^{m}C_{ds}T_{ds} Tₑₛ^{m}Cₑₛ^{m}CₑₛTₑₛTₑ | | 13ₐ | | | |
| 670699 | GalNAc₃-3ₐ-_{o′}T_{do}Gₑₛ^{m}CₑₒTₑₒTₑₒ^{m}CₑₒA_{ds}G_{ds}T_{ds} | PO/PS | GalNAc₃- | T_{d} | 15 | 2309 |
| | ^{m}C_{ds}A_{ds}T_{ds} G_{ds}A_{ds}^{m}C_{ds}T_{ds}Tₑₒ^{m}Cₑₒ^{m}CₑₛTₑₛTₑ | | 3ₐ | | | |
| 670700 | GalNAc₃-3ₐ-_{o′}AₑₒGₑₛ^{m}CₑₒTₑₒTₑₒ^{m}CₑₒA_{ds}G_{ds}T_{ds} | PO/PS | GalNAc₃- | Aₑ | 30 | 2306 |
| | ^{m}C_{ds}A_{ds}T_{ds} G_{ds}A_{ds}^{m}C_{ds}T_{ds}Tₑₒ^{m}Cₑₒ^{m}CₑₛTₑₛT | | 3ₐ | | | |
| 670701 | GalNAc₃-3ₐ-_{o′}TₑₒGₑₛ^{m}CₑₒTₑₒTₑₒ^{m}CₑₒA_{ds}G_{ds}T_{ds} | PO/PS | GalNAc₃- | Tₑ | 25 | 2306 |
| | ^{m}C_{ds}A_{ds}T_{ds} G_{ds}A_{ds}^{m}C_{ds}T_{ds}Tₑₒ^{m}Cₑₒ^{m}CₑₛTₑₛTₑ | | 3ₐ | | | |
| 671144 | GalNAc₃-12ₐ-_{o′}A_{do}Gₑₛ^{m}CₑₛTₑₛTₑₛ^{m}CₑₛA_{ds}G_{ds}T_{ds} | PS | GalNAc₃- | A_{d} | 40 | 2306 |
| | ^{m}C_{ds}A_{ds}T_{ds}G_{ds}A_{ds}^{m}C_{ds}T_{ds} Tₑₛ^{m}Cₑₛ^{m}CₑₛTₑₛTₑ | | 12ₐ | | | |
| 671165 | GalNAc₃-13ₐ-_{o′}A_{do}Gₑₛ^{m}CₑₒTₑₒTₑₒ^{m}CₑₒA_{ds}G_{ds}T_{ds} | PO/PS | GalNAc₃- | A_{d} | 8 | 2306 |
| | ^{m}C_{ds}A_{ds}T_{ds} G_{ds}A_{ds}^{m}C_{ds}T_{ds}Tₑₒ^{m}Cₑₒ^{m}CₑₛTₑₛT | | 13ₐ | | | |
| 671261 | GalNAc₃-14ₐ-_{o′}A_{do}Gₑₛ^{m}CₑₛTₑₛTₑₛ^{m}CₑₛA_{ds}G_{ds}T_{ds} | PS | GalNAc₃- | A_{d} | >250 | 2306 |
| | ^{m}C_{ds}A_{ds}T_{ds}G_{ds}A_{ds}^{m}C_{ds}T_{ds} Tₑₛ^{m}Cₑₛ^{m}CₑₛTₑₛTₑ | | 14ₐ | | | |
| 671262 | GalNAc₃-15ₐ-_{o′}A_{do}Gₑₛ^{m}CₑₛTₑₛTₑₛ^{m}CₑₛA_{ds}G_{ds}T_{ds} | PS | GalNAc₃- | A_{d} | >250 | 2306 |
| | ^{m}C_{ds}A_{ds}T_{ds}G_{ds}A_{ds}^{m}C_{ds}T_{ds} Tₑₛ^{m}Cₑₛ^{m}CₑₛTₑₛTₑ | | 15ₐ | | | |
| 673501 | GalNAc₃-7ₐ-_{o′}A_{do}Gₑₛ^{m}CₑₒTₑₒTₑₒ^{m}CₑₒA_{ds}G_{ds}T_{ds} | PO/PS | GalNAc₃- | A_{d} | 30 | 2306 |
| | ^{m}C_{ds}A_{ds}T_{ds}G_{ds}A_{ds}^{m}C_{ds}T_{ds}Tₑₒ^{m}Cₑₒ^{m}CₑₛTₑₛTₑ | | 7ₐ | | | |
| 673502 | GalNAc₃-10ₐ-_{o′}A_{do}Gₑₛ^{m}CₑₒTₑₒTₑₒ^{m}CₑₒA_{ds}G_{ds}T_{ds} | PO/PS | GalNAc₃- | A_{d} | 8 | 2306 |
| | ^{m}C_{ds}A_{ds}T_{ds}G_{ds}A_{ds}^{m}C_{ds}T_{ds} Tₑₒ^{m}Cₑₒ^{m}CₑₛTₑₛTₑ | | 10ₐ | | | |
| 675441 | GalNAc₃-17ₐ-_{o′}A_{do}Gₑₛ^{m}CₑₛTₑₛTₑₛ^{m}CₑₛA_{ds}G_{ds}T_{ds} | PS | GalNAc₃- | A_{d} | 30 | 2306 |
| | ^{m}C_{ds}A_{ds}T_{ds}G_{ds}A_{ds}^{m}C_{ds}T_{ds} Tₑₛ^{m}Cₑₛ^{m}CₑₛTₑₛTₑ | | 17ₐ | | | |
| 675442 | GalNAc₃-18ₐ-_{o′}A_{do}Gₑₛ^{m}CₑₛTₑₛTₑₛ^{m}CₑₛA_{ds}G_{ds}T_{ds} | PS | GalNAc₃- | A_{d} | 20 | 2306 |
| | ^{m}C_{ds}A_{ds}T_{ds}G_{ds}A_{ds}^{m}C_{ds}T_{ds} Tₑₛ^{m}Cₑₛ^{m}CₑₛTₑₛTₑ | | 18ₐ | | | |
| 677841 | Gₑₛ^{m}CₑₛTₑₛTₑₛ^{m}CₑₛA_{ds}G_{ds}T_{ds}^{m}C_{ds}A_{ds}T_{ds}G_{ds}A_{ds} | PS | GalNAc₃- | A_{d} | 40 | 2305 |
| | ^{m}C_{ds}T_{ds}Tₑₛ^{m}Cₑₛ^{m}CₑₛTₑₛTₑₒA_{do′}-GalNAc₃-19ₐ | | 19ₐ | | | |
| 677842 | Gₑₛ^{m}CₑₛTₑₛTₑₛ^{m}CₑₛA_{ds}G_{ds}T_{ds}^{m}C_{ds}A_{ds}T_{ds}G_{ds}A_{ds} | PS | GalNAc₃- | A_{d} | 30 | 2305 |
| | ^{m}C_{ds}T_{ds}Tₑₛ^{m}Cₑₛ^{m}CₑₛTₑₛTₑₒA_{do′}-GalNAc₃-20ₐ | | 20ₐ | | | |
| 677843 | GalNAc₃-23ₐ-_{o′}A_{do}Gₑₛ^{m}CₑₛTₑₛTₑₛ^{m}CₑₛA_{ds}G_{ds}T_{ds} | PS | GalNAc₃- | A_{d} | 40 | 2306 |
| | ^{m}C_{ds}A_{ds}T_{ds}G_{ds}A_{ds}^{m}C_{ds}T_{ds} Tₑₛ^{m}Cₑₛ^{m}CₑₛTₑₛTₑ | | 23ₐ | | | |

[1038] The structure of GalNAc₃-1ₐ was shown previously in Example 9, GalNAc₃-3ₐ was shown in Example 39, GalNAc₃-5ₐ was shown in Example 49, GalNAc₃-6ₐ was shown in Example 51, GalNAc₃-7ₐ was shown in Example 48, GalNAc₃-8ₐ was shown in Example 47, GalNAc₃-9ₐ was shown in Example 52, GalNAc₃-10ₐ was shown in Example 46, GalNAc₃-12ₐ was shown in Example 61, GalNAc₃-13ₐ was shown in Example 62, GalNAc₃-14ₐ was shown in Example 63, GalNAc₃-15ₐ was shown in Example 64, GalNAc₃-17ₐ was shown in Example 68, GalNAc₃-18ₐ was shown in Example 69, GalNAc₃-19ₐ was shown in Example 70, GalNAc₃-20ₐ was shown in Example 71, and GalNAc₃-23ₐ was shown in Example 76.

### Example 83: Antisense Inhibition In Vivo by Oligonucleotides Targeting Factor XI Comprising a GalNAc₃ Conjugate

[1039] The oligonucleotides listed in Table 77 below were tested in a study for dose-dependent inhibition of Factor XI in mice.

TABLE 77
Modified oligonucleotides targeting Factor XI

| ISIS | | GalNAc | | SEQ |
|---|---|---|---|---|
| No. | Sequence (5′ to 3′) | cluster | CM | ID No. |
| 404071 | TₑₛGₑₛGₑₛTₑₛAₑₛA_{ds}T_{ds}^{m}C_{ds}^{m}C_{ds}A_{ds}^{m}C_{ds}T_{ds}T_{ds}T_{ds}^{m}C_{ds}AₑₛGₑₛ | n/a | n/a | 2307 |
| | AₑₛGₑₛGₑ | | | |
| 656173 | TₑₛGₑₒGₑₒTₑₒAₑₒA_{ds}T_{ds}^{m}C_{ds}^{m}C_{ds}A_{ds}^{m}C_{ds}T_{ds}T_{ds}T_{ds}^{m}C_{ds}AₑₒGₑₒ | GalNAc₃-1ₐ | A_{d} | 2308 |
| | AₑₛGₑₛGₑₒA_{do′}-GalNAc₃-1ₐ | | | |
| 663086 | GalNAc₃-3ₐ-_{o′}A_{do}TₑₛGₑₒGₑₒTₑₒAₑₒA_{ds}T_{ds}^{m}C_{ds}^{m}C_{ds}A_{ds}^{m}C_{ds}T_{ds} | GalNAc₃-3ₐ | A_{d} | 2316 |
| | T_{ds}T_{ds}^{m}C_{ds}AₑₒGₑₒAₑₛGₑₛGₑ | | | |
| 678347 | GalNAc₃-7ₐ-_{o′}A_{do}TₑₛGₑₒGₑₒTₑₒAₑₒA_{ds}T_{ds}^{m}C_{ds}^{m}C_{ds}A_{ds}^{m}C_{ds}T_{ds} | GalNAc₃-7ₐ | A_{d} | 2316 |
| | T_{ds}T_{ds}^{m}C_{ds}AₑₒGₑₒAₑₛGₑₛGₑ | | | |
| 678348 | GalNAc₃-10ₐ-_{o′}A_{do}TₑₛGₑₒGₑₒTₑₒAₑₒA_{ds}T_{ds}^{m}C_{ds}^{m}C_{ds}A_{ds}^{m}C_{ds} | GalNAc₃-10ₐ | A_{d} | 2316 |
| | T_{ds}T_{ds}T_{ds}^{m}C_{ds}AₑₒGₑₒAₑₛGₑₛGₑ | | | |
| 678349 | GalNAc₃-13ₐ-_{o′}A_{do}TₑₛGₑₒGₑₒTₑₒAₑₒA_{ds}T_{ds}^{m}C_{ds}^{m}C_{ds}A_{ds}^{m}C_{ds} | GalNAc₃-13ₐ | A_{d} | 2316 |
| | T_{ds}T_{ds}T_{ds}^{m}C_{ds}AₑₒGₑₒAₑₛGₑₛGₑ | | | |

[1040] The structure of GalNAc₃-1ₐ was shown previously in Example 9, GalNAc₃-3ₐ was shown in Example 39, GalNAc₃-7ₐ was shown in Example 48, GalNAc₃-10ₐ was shown in Example 46, and GalNAc₃-13ₐ was shown in Example 62.

### Treatment

[1041] Six to eight week old mice were each injected subcutaneously once per week at a dosage shown below, for a total of three doses, with an oligonucleotide listed below or with PBS. Each treatment group consisted of 4 animals. The mice were sacrificed 72 hours following the final dose. Factor XI liver mRNA levels were measured using real-time PCR and normalized to cyclophilin according to standard protocols. Liver transaminases, BUN, and bilirubin were also measured. The results below are presented as the average percent for each treatment group, normalized to the PBS control.

[1042] As illustrated in Table 78, treatment with antisense oligonucleotides lowered Factor XI liver mRNA in a dose-dependent manner. The results show that the oligonucleotides comprising a GalNAc conjugate were more potent than the parent lacking a GalNAc conjugate (ISIS 404071). Furthermore, the oligonucleotides comprising a 5′-GalNAc conjugate (ISIS 663086, 678347, 678348, and 678349) were even more potent than the oligonucleotide comprising a 3′-GalNAc conjugate (ISIS 656173).

TABLE 78
Factor XI liver mRNA, liver transaminase, BUN, and bilirubin levels

| ISIS | Dosage | Factor XI | ALT | AST | BUN | Bilirubin | GalNAc₃ | SEQ |
|---|---|---|---|---|---|---|---|---|
| No. | (mg/kg) | mRNA (% PBS) | (U/L) | (U/L) | (mg/dL) | (mg/dL) | Cluster | ID No. |
| PBS | n/a | 100 | 63 | 70 | 21 | 0.18 | n/a | n/a |
| 404071 | 3 | 65 | 41 | 58 | 21 | 0.15 | n/a | 2307 |
| | 10 | 33 | 49 | 53 | 23 | 0.15 | | |
| | 30 | 17 | 43 | 57 | 22 | 0.14 | | |
| 656173 | 0.7 | 43 | 90 | 89 | 21 | 0.16 | GalNAc₃-1a | 2308 |
| | 2 | 9 | 36 | 58 | 26 | 0.17 | | |
| | 6 | 3 | 50 | 63 | 25 | 0.15 | | |
| 663086 | 0.7 | 33 | 91 | 169 | 25 | 0.16 | GalNAc₃-3a | 2316 |
| | 2 | 7 | 38 | 55 | 21 | 0.16 | | |
| | 6 | 1 | 34 | 40 | 23 | 0.14 | | |
| 678347 | 0.7 | 35 | 28 | 49 | 20 | 0.14 | GalNAc₃-7a | 2316 |
| | 2 | 10 | 180 | 149 | 21 | 0.18 | | |
| | 6 | 1 | 44 | 76 | 19 | 0.15 | | |
| 678348 | 0.7 | 39 | 43 | 54 | 21 | 0.16 | GalNAc₃-10a | 2316 |
| | 2 | 5 | 38 | 55 | 22 | 0.17 | | |
| | 6 | 2 | 25 | 38 | 20 | 0.14 | | |
| 678349 | 0.7 | 34 | 39 | 46 | 20 | 0.16 | GalNAc₃-13a | 2316 |
| | 2 | 8 | 43 | 63 | 21 | 0.14 | | |
| | 6 | 2 | 28 | 41 | 20 | 0.14 | | |

### Example 84: Duration of Action In Vivo of Oligonucleotides Targeting Factor XI Comprising a GalNAc₃ Conjugate

[1043] The oligonucleotides listed in Table 77 were tested in a single dose study for duration of action in mice.

### Treatment

[1044] Six to eight week old mice were each injected subcutaneously once with an oligonucleotide listed in Table 77 or with PBS. Each treatment group consisted of 4 animals. Blood was drawn by tail bleeds the day before dosing to determine baseline and at 3, 10, and 17 days following the dose. Plasma Factor XI protein levels were measured by ELISA using Factor XI capture and biotinylated detection antibodies from R & D Systems, Minneapolis, Minn. (catalog # AF2460 and # BAF2460, respectively) and the OptElA Reagent Set B (Catalog #550534, BD Biosciences, San Jose, Calif.). The results below are presented as the average percent of plasma Factor XI protein levels for each treatment group, normalized to baseline levels. The results show that the oligonucleotides comprising a GalNAc conjugate were more potent with longer duration of action than the parent lacking a GalNAc conjugate (ISIS 404071). Furthermore, the oligonucleotides comprising a 5′-GalNAc conjugate (ISIS 663086, 678347, 678348, and 678349) were even more potent with an even longer duration of action than the oligonucleotide comprising a 3′-GalNAc conjugate (ISIS 656173).

TABLE 79
Plasma Factor XI protein levels in mice

| | | Time | | | | |
|---|---|---|---|---|---|---|
| | | point | Factor | | | SEQ |
| ISIS | Dosage | (days | XI (% | GalNAc₃ | | ID |
| No. | (mg/kg) | post-dose) | baseline) | Cluster | CM | No. |
| PBS | n/a | 3 | 123 | n/a | n/a | n/a |
| | | 10 | 56 | | | |
| | | 17 | 100 | | | |
| 404071 | 30 | 3 | 11 | n/a | n/a | 2307 |
| | | 10 | 47 | | | |
| | | 17 | 52 | | | |
| 656173 | 6 | 3 | 1 | GalNAc₃-1a | A_{d} | 2308 |
| | | 10 | 3 | | | |
| | | 17 | 21 | | | |
| 663086 | 6 | 3 | 1 | GalNAc₃-3a | A_{d} | 2316 |
| | | 10 | 2 | | | |
| | | 17 | 9 | | | |
| 678347 | 6 | 3 | 1 | GalNAc₃-7a | A_{d} | 2316 |
| | | 10 | 1 | | | |
| | | 17 | 8 | | | |
| 678348 | 6 | 3 | 1 | GalNAc₃-10a | A_{d} | 2316 |
| | | 10 | 1 | | | |
| | | 17 | 6 | | | |
| 678349 | 6 | 3 | 1 | GalNAc₃-13a | A_{d} | 2316 |
| | | 10 | 1 | | | |
| | | 17 | 5 | | | |

### Example 85: Antisense Inhibition In Vivo by Oligonucleotides Targeting SRB-1 Comprising a GalNAc₃ Conjugate

[1045] Oligonucleotides listed in Table 76 were tested in a dose-dependent study for antisense inhibition of SRB-1 in mice.

### Treatment

[1046] Six to eight week old C57BL/6 mice were each injected subcutaneously once per week at a dosage shown below, for a total of three doses, with an oligonucleotide listed in Table 76 or with saline. Each treatment group consisted of 4 animals. The mice were sacrificed 48 hours following the final administration to determine the SRB-1 mRNA levels using real-time PCR and RIBOGREEN® RNA quantification reagent (Molecular Probes, Inc. Eugene, Oreg.) according to standard protocols. The results below are presented as the average percent of liver SRB-1 mRNA levels for each treatment group, normalized to the saline control.

[1047] As illustrated in Tables 80 and 81, treatment with antisense oligonucleotides lowered SRB-1 mRNA levels in a dose-dependent manner.

TABLE 80
SRB-1 mRNA in liver

| ISIS | Dosage | SRB-1 mRNA | GalNAc₃ | |
|---|---|---|---|---|
| No. | (mg/kg) | (% Saline) | Cluster | CM |
| Saline | n/a | 100 | n/a | n/a |
| 655861 | 0.1 | 94 | GalNAc₃-1a | A_{d} |
| | 0.3 | 119 | | |
| | 1 | 68 | | |
| | 3 | 32 | | |
| 661161 | 0.1 | 120 | GalNAc₃-3a | A_{d} |
| | 0.3 | 107 | | |
| | 1 | 68 | | |
| | 3 | 26 | | |
| 666881 | 0.1 | 107 | GalNAc₃-10a | A_{d} |
| | 0.3 | 107 | | |
| | 1 | 69 | | |
| | 3 | 27 | | |
| 666981 | 0.1 | 120 | GalNAc₃-7a | A_{d} |
| | 0.3 | 103 | | |
| | 1 | 54 | | |
| | 3 | 21 | | |
| 670061 | 0.1 | 118 | GalNAc₃-13a | A_{d} |
| | 0.3 | 89 | | |
| | 1 | 52 | | |
| | 3 | 18 | | |
| 677842 | 0.1 | 119 | GalNAc₃-20a | A_{d} |
| | 0.3 | 96 | | |
| | 1 | 65 | | |
| | 3 | 23 | | |

TABLE 81
SRB-1 mRNA in liver

| ISIS | | SRB-1 mRNA (% | | |
|---|---|---|---|---|
| No. | Dosage (mg/kg) | Saline) | GalNAc₃ Cluster | CM |
| 661161 | 0.1 | 107 | GalNAc₃-3a | A_{d} |
| | 0.3 | 95 | | |
| | 1 | 53 | | |
| | 3 | 18 | | |
| 677841 | 0.1 | 110 | GalNAc₃-19a | A_{d} |
| | 0.3 | 88 | | |
| | 1 | 52 | | |
| | 3 | 25 | | |

[1048] Liver transaminase levels, total bilirubin, BUN, and body weights were also measured using standard protocols. Average values for each treatment group are shown in Table 82 below.

TABLE 82

| ISIS | Dosage | ALT | AST | Bilirubin | BUN | Body Weight | GalNAc₃ | |
|---|---|---|---|---|---|---|---|---|
| No. | (mg/kg) | (U/L) | (U/L) | (mg/dL) | (mg/dL) | (% baseline) | Cluster | CM |
| Saline | n/a | 19 | 39 | 0.17 | 26 | 118 | n/a | n/a |
| 655861 | 0.1 | 25 | 47 | 0.17 | 27 | 114 | GalNAc₃-1a | A_{d} |
| | 0.3 | 29 | 56 | 0.15 | 27 | 118 | | |
| | 1 | 20 | 32 | 0.14 | 24 | 112 | | |
| | 3 | 27 | 54 | 0.14 | 24 | 115 | | |
| 661161 | 0.1 | 35 | 83 | 0.13 | 24 | 113 | GalNAc₃-3a | A_{d} |
| | 0.3 | 42 | 61 | 0.15 | 23 | 117 | | |
| | 1 | 34 | 60 | 0.18 | 22 | 116 | | |
| | 3 | 29 | 52 | 0.13 | 25 | 117 | | |
| 666881 | 0.1 | 30 | 51 | 0.15 | 23 | 118 | GalNAc₃-10a | A_{d} |
| | 0.3 | 49 | 82 | 0.16 | 25 | 119 | | |
| | 1 | 23 | 45 | 0.14 | 24 | 117 | | |
| | 3 | 20 | 38 | 0.15 | 21 | 112 | | |
| 666981 | 0.1 | 21 | 41 | 0.14 | 22 | 113 | GalNAc₃-7a | A_{d} |
| | 0.3 | 29 | 49 | 0.16 | 24 | 112 | | |
| | 1 | 19 | 34 | 0.15 | 22 | 111 | | |
| | 3 | 77 | 78 | 0.18 | 25 | 115 | | |
| 670061 | 0.1 | 20 | 63 | 0.18 | 24 | 111 | GalNAc₃-13a | A_{d} |
| | 0.3 | 20 | 57 | 0.15 | 21 | 115 | | |
| | 1 | 20 | 35 | 0.14 | 20 | 115 | | |
| | 3 | 27 | 42 | 0.12 | 20 | 116 | | |
| 677842 | 0.1 | 20 | 38 | 0.17 | 24 | 114 | GalNAc₃-20a | A_{d} |
| | 0.3 | 31 | 46 | 0.17 | 21 | 117 | | |
| | 1 | 22 | 34 | 0.15 | 21 | 119 | | |
| | 3 | 41 | 57 | 0.14 | 23 | 118 | | |

### Example 86: Antisense Inhibition In Vivo by Oligonucleotides Targeting TTR Comprising a GalNAc₃ Conjugate

[1049] Oligonucleotides listed in Table 83 below were tested in a dose-dependent study for antisense inhibition of human transthyretin (TTR) in transgenic mice that express the human TTR gene.

### Treatment

[1050] Eight week old TTR transgenic mice were each injected subcutaneously once per week for three weeks, for a total of three doses, with an oligonucleotide and dosage listed in the tables below or with PBS. Each treatment group consisted of 4 animals. The mice were sacrificed 72 hours following the final administration. Tail bleeds were performed at various time points throughout the experiment, and plasma TTR protein, ALT, and AST levels were measured and reported in Tables 84-87. After the animals were sacrificed, plasma ALT, AST, and human TTR levels were measured, as were body weights, organ weights, and liver human TTR mRNA levels. TTR protein levels were measured using a clinical analyzer (AU480, Beckman Coulter, Calif.). Real-time PCR and RIBOGREEN® RNA quantification reagent (Molecular Probes, Inc. Eugene, Oreg.) were used according to standard protocols to determine liver human TTR mRNA levels. The results presented in Tables 84-87 are the average values for each treatment group. The mRNA levels are the average values relative to the average for the PBS group. Plasma protein levels are the average values relative to the average value for the PBS group at baseline. Body weights are the average percent weight change from baseline until sacrifice for each individual treatment group. Organ weights shown are normalized to the animal's body weight, and the average normalized organ weight for each treatment group is then presented relative to the average normalized organ weight for the PBS group.

[1051] In Tables 84-87, “BL” indicates baseline, measurements that were taken just prior to the first dose. As illustrated in Tables 84 and 85, treatment with antisense oligonucleotides lowered TTR expression levels in a dose-dependent manner. The oligonucleotides comprising a GalNAc conjugate were more potent than the parent lacking a GalNAc conjugate (ISIS 420915). Furthermore, the oligonucleotides comprising a GalNAc conjugate and mixed PS/PO internucleoside linkages were even more potent than the oligonucleotide comprising a GalNAc conjugate and full PS linkages.

TABLE 83
Oligonucleotides targeting human TTR

| | | | GalNAc | | SEQ |
|---|---|---|---|---|---|
| Isis No. | Sequence 5′ to 3′ | Linkages | cluster | CM | ID No. |
| 420915 | Tₑₛ^{m}CₑₛTₑₛTₑₛGₑₛG_{ds}T_{ds}T_{ds}A_{ds}^{m}C_{ds}A_{ds}T_{ds}G_{ds}A_{ds}A_{ds} | PS | n/a | n/a | 2317 |
| | AₑₛTₑₛ^{m}Cₑₛ^{m}Cₑₛ^{m}Cₑ | | | | |
| 660261 | Tₑₛ^{m}CₑₛTₑₛTₑₛGₑₛG_{ds}T_{ds}T_{ds}A_{ds}^{m}C_{ds}A_{ds}T_{ds}G_{ds}A_{ds}A_{ds} | PS | GalNAc₃-1a | A_{d} | 2318 |
| | AₑₛTₑₛ^{m}Cₑₛ^{m}Cₑₛ^{m}CₑₒA_{do′}-GalNAc₃-1ₐ | | | | |
| 682883 | GalNAc₃-3_{a-o′}Tₑₛ^{m}CₑₒTₑₒTₑₒGₑₒG_{ds}T_{ds}T_{ds}A_{ds}^{m}C_{ds}A_{ds} | PS/PO | GalNAc₃-3a | PO | 2317 |
| | T_{ds}G_{ds}A_{ds}A_{ds}AₑₒTₑₒ^{m}Cₑₛ^{m}Cₑₛ^{m}Cₑ | | | | |
| 682884 | GalNAc₃-7_{a-o′}Tₑₛ^{m}CₑₒTₑₒTₑₒGₑₒG_{ds}T_{ds}T_{ds}A_{ds}^{m}C_{ds}A_{ds} | PS/PO | GalNAc₃-7a | PO | 2317 |
| | T_{ds}G_{ds}A_{ds}A_{ds}AₑₒTₑₒ^{m}Cₑₛ^{m}Cₑₛ^{m}Cₑ | | | | |
| 682885 | GalNAc₃-10_{a-o′}Tₑₛ^{m}CₑₒTₑₒTₑₒGₑₒG_{ds}T_{ds}T_{ds}A_{ds}^{m}C_{ds} | PS/PO | GalNAc₃-10a | PO | 2317 |
| | A_{ds}T_{ds}G_{ds}A_{ds}A_{ds}AₑₒTₑₒ^{m}Cₑₛ^{m}Cₑₛ^{m}Cₑ | | | | |
| 682886 | GalNAc₃-13_{a-o′}Tₑₛ^{m}CₑₒTₑₒTₑₒGₑₒG_{ds}T_{ds}T_{ds}A_{ds}^{m}C_{ds} | PS/PO | GalNAc₃-13a | PO | 2317 |
| | A_{ds}T_{ds}G_{ds}A_{ds}A_{ds}AₑₒTₑₒ^{m}Cₑₛ^{m}Cₑₛ^{m}Cₑ | | | | |
| 684057 | Tₑₛ^{m}CₑₒTₑₒTₑₒGₑₒG_{ds}T_{ds}T_{ds}A_{ds}^{m}C_{ds}A_{ds}T_{ds}G_{ds}A_{ds}A_{ds} | PS/PO | GalNAc₃-19a | A_{d} | 2318 |
| | AₑₒTₑₒ^{m}Cₑₛ^{m}Cₑₛ^{m}CₑₒA_{do′}-GalNAc₃-19ₐ | | | | |

[1052] The legend for Table 85 can be found in Example 74. The structure of GalNAc₃-1 was shown in Example 9. The structure of GalNAc₃-3ₐ was shown in Example 39. The structure of GalNAc₃-7ₐ was shown in Example 48. The structure of GalNAc₃-10ₐ was shown in Example 46. The structure of GalNAc₃-13ₐ was shown in Example 62. The structure of GalNAc₃-19ₐ was shown in Example 70.

TABLE 84
Antisense inhibition of human TTR in vivo

| | | TTR | Plasma | | | |
|---|---|---|---|---|---|---|
| | | mRNA | TTR | | | |
| Isis | Dosage | (% | protein | GalNAc | | SEQ ID |
| No. | (mg/kg) | PBS) | (% PBS) | cluster | CM | No. |
| PBS | n/a | 100 | 100 | n/a | n/a | |
| 420915 | 6 | 99 | 95 | n/a | n/a | 2317 |
| | 20 | 48 | 65 | | | |
| | 60 | 18 | 28 | | | |
| 660261 | 0.6 | 113 | 87 | GalNAc₃-1a | A_{d} | 2318 |
| | 2 | 40 | 56 | | | |
| | 6 | 20 | 27 | | | |
| | 20 | 9 | 11 | | | |

TABLE 85
Antisense inhibition of human TTR in vivo

| | | TTR | Plasma TTR protein (% PBS at BL) | | | | | | SEQ |
|---|---|---|---|---|---|---|---|---|---|
| | Dosage | mRNA | | | | Day 17 | GalNAc | | ID |
| Isis No. | (mg/kg) | (% PBS) | BL | Day 3 | Day 10 | (After sac) | cluster | CM | No. |
| PBS | n/a | 100 | 100 | 96 | 90 | 114 | n/a | n/a | |
| 420915 | 6 | 74 | 106 | 86 | 76 | 83 | n/a | n/a | 2317 |
| | 20 | 43 | 102 | 66 | 61 | 58 | | | |
| | 60 | 24 | 92 | 43 | 29 | 32 | | | |
| 682883 | 0.6 | 60 | 88 | 73 | 63 | 68 | GalNAc₃- | PO | 2317 |
| | 2 | 18 | 75 | 38 | 23 | 23 | 3a | | |
| | 6 | 10 | 80 | 35 | 11 | 9 | | | |
| 682884 | 0.6 | 56 | 88 | 78 | 63 | 67 | GalNAc₃- | PO | 2317 |
| | 2 | 19 | 76 | 44 | 25 | 23 | 7a | | |
| | 6 | 15 | 82 | 35 | 21 | 24 | | | |
| 682885 | 0.6 | 60 | 92 | 77 | 68 | 76 | GalNAc₃- | PO | 2317 |
| | 2 | 22 | 93 | 58 | 32 | 32 | 10a | | |
| | 6 | 17 | 85 | 37 | 25 | 20 | | | |
| 682886 | 0.6 | 57 | 91 | 70 | 64 | 69 | GalNAc₃- | PO | 2317 |
| | 2 | 21 | 89 | 50 | 31 | 30 | 13a | | |
| | 6 | 18 | 102 | 41 | 24 | 27 | | | |
| 684057 | 0.6 | 53 | 80 | 69 | 56 | 62 | GalNAc₃- | A_{d} | 2318 |
| | 2 | 21 | 92 | 55 | 34 | 30 | 19a | | |
| | 6 | 11 | 82 | 50 | 18 | 13 | | | |

TABLE 86
Transaminase levels, body weight changes, and relative organ weights

| | | ALT (U/L) | | | | AST (U/L) | | | | Body | Liver | Spleen | Kidney | |
|---|---|---|---|---|---|---|---|---|---|---|---|---|---|---|
| | Dosage | | | Day | Day | | | Day | Day | (% | (% | (% | (% | SEQ |
| Isis No. | (mg/kg) | BL | Day 3 | 10 | 17 | BL | Day 3 | 10 | 17 | BL) | PBS) | PBS) | PBS) | ID No. |
| PBS | n/a | 33 | 34 | 33 | 24 | 58 | 62 | 67 | 52 | 105 | 100 | 100 | 100 | n/a |
| 420915 | 6 | 34 | 33 | 27 | 21 | 64 | 59 | 73 | 47 | 115 | 99 | 89 | 91 | 2317 |
| | 20 | 34 | 30 | 28 | 19 | 64 | 54 | 56 | 42 | 111 | 97 | 83 | 89 | |
| | 60 | 34 | 35 | 31 | 24 | 61 | 58 | 71 | 58 | 113 | 102 | 98 | 95 | |
| 660261 | 0.6 | 33 | 38 | 28 | 26 | 70 | 71 | 63 | 59 | 111 | 96 | 99 | 92 | 2318 |
| | 2 | 29 | 32 | 31 | 34 | 61 | 60 | 68 | 61 | 118 | 100 | 92 | 90 | |
| | 6 | 29 | 29 | 28 | 34 | 58 | 59 | 70 | 90 | 114 | 99 | 97 | 95 | |
| | 20 | 33 | 32 | 28 | 33 | 64 | 54 | 68 | 95 | 114 | 101 | 106 | 92 | |

TABLE 87
Transaminase levels, body weight changes, and relative organ weights

| | | ALT (U/L) | | | | AST (U/L) | | | | Body | Liver | Spleen | Kidney | |
|---|---|---|---|---|---|---|---|---|---|---|---|---|---|---|
| | Dosage | | | Day | Day | | | Day | Day | (% | (% | (% | (% | SEQ |
| Isis No. | (mg/kg) | BL | Day 3 | 10 | 17 | BL | Day 3 | 10 | 17 | BL) | PBS) | PBS) | PBS) | ID No. |
| PBS | n/a | 32 | 34 | 37 | 41 | 62 | 78 | 76 | 77 | 104 | 100 | 100 | 100 | n/a |
| 420915 | 6 | 32 | 30 | 34 | 34 | 61 | 71 | 72 | 66 | 102 | 103 | 102 | 105 | 2317 |
| | 20 | 41 | 34 | 37 | 33 | 80 | 76 | 63 | 54 | 106 | 107 | 135 | 101 | |
| | 60 | 36 | 30 | 32 | 34 | 58 | 81 | 57 | 60 | 106 | 105 | 104 | 99 | |
| 682883 | 0.6 | 32 | 35 | 38 | 40 | 53 | 81 | 74 | 76 | 104 | 101 | 112 | 95 | 2317 |
| | 2 | 38 | 39 | 42 | 43 | 71 | 84 | 70 | 77 | 107 | 98 | 116 | 99 | |
| | 6 | 35 | 35 | 41 | 38 | 62 | 79 | 103 | 65 | 105 | 103 | 143 | 97 | |
| 682884 | 0.6 | 33 | 32 | 35 | 34 | 70 | 74 | 75 | 67 | 101 | 100 | 130 | 99 | 2317 |
| | 2 | 31 | 32 | 38 | 38 | 63 | 77 | 66 | 55 | 104 | 103 | 122 | 100 | |
| | 6 | 38 | 32 | 36 | 34 | 65 | 85 | 80 | 62 | 99 | 105 | 129 | 95 | |
| 682885 | 0.6 | 39 | 26 | 37 | 35 | 63 | 63 | 77 | 59 | 100 | 109 | 109 | 112 | 2317 |
| | 2 | 30 | 26 | 38 | 40 | 54 | 56 | 71 | 72 | 102 | 98 | 111 | 102 | |
| | 6 | 27 | 27 | 34 | 35 | 46 | 52 | 56 | 64 | 102 | 98 | 113 | 96 | |
| 682886 | 0.6 | 30 | 40 | 34 | 36 | 58 | 87 | 54 | 61 | 104 | 99 | 120 | 101 | 2317 |
| | 2 | 27 | 26 | 34 | 36 | 51 | 55 | 55 | 69 | 103 | 91 | 105 | 92 | |
| | 6 | 40 | 28 | 34 | 37 | 107 | 54 | 61 | 69 | 109 | 100 | 102 | 99 | |
| 684057 | 0.6 | 35 | 26 | 33 | 39 | 56 | 51 | 51 | 69 | 104 | 99 | 110 | 102 | 2318 |
| | 2 | 33 | 32 | 31 | 40 | 54 | 57 | 56 | 87 | 103 | 100 | 112 | 97 | |
| | 6 | 39 | 33 | 35 | 40 | 67 | 52 | 55 | 92 | 98 | 104 | 121 | 108 | |

### Example 87: Duration of Action In Vivo by Single Doses of Oligonucleotides Targeting TTR Comprising a GalNAc₃ Conjugate

[1053] ISIS numbers 420915 and 660261 (see Table 83) were tested in a single dose study for duration of action in mice. ISIS numbers 420915, 682883, and 682885 (see Table 83) were also tested in a single dose study for duration of action in mice.

### Treatment

[1054] Eight week old, male transgenic mice that express human TTR were each injected subcutaneously once with 100 mg/kg ISIS No. 420915 or 13.5 mg/kg ISIS No. 660261. Each treatment group consisted of 4 animals. Tail bleeds were performed before dosing to determine baseline and at days 3, 7, 10, 17, 24, and 39 following the dose. Plasma TTR protein levels were measured as described in Example 86. The results below are presented as the average percent of plasma TTR levels for each treatment group, normalized to baseline levels.

TABLE 88
Plasma TTR protein levels

| | | Time | | | | SEQ |
|---|---|---|---|---|---|---|
| ISIS | Dosage | point (days | TTR (% | GalNAc₃ | | ID |
| No. | (mg/kg) | post-dose) | baseline) | Cluster | CM | No. |
| 420915 | 100 | 3 | 30 | n/a | n/a | 2317 |
| | | 7 | 23 | | | |
| | | 10 | 35 | | | |
| | | 17 | 53 | | | |
| | | 24 | 75 | | | |
| | | 39 | 100 | | | |
| 660261 | 13.5 | 3 | 27 | GalNAc₃-1a | A_{d} | 2318 |
| | | 7 | 21 | | | |
| | | 10 | 22 | | | |
| | | 17 | 36 | | | |
| | | 24 | 48 | | | |
| | | 39 | 69 | | | |

### Treatment

[1055] Female transgenic mice that express human TTR were each injected subcutaneously once with 100 mg/kg ISIS No. 420915, 10.0 mg/kg ISIS No. 682883, or 10.0 mg/kg 682885. Each treatment group consisted of 4 animals. Tail bleeds were performed before dosing to determine baseline and at days 3, 7, 10, 17, 24, and 39 following the dose. Plasma TTR protein levels were measured as described in Example 86. The results below are presented as the average percent of plasma TTR levels for each treatment group, normalized to baseline levels.

TABLE 89
Plasma TTR protein levels

| | | Time | | | | SEQ |
|---|---|---|---|---|---|---|
| ISIS | Dosage | point (days | TTR (% | GalNAc₃ | | ID |
| No. | (mg/kg) | post-dose) | baseline) | Cluster | CM | No. |
| 420915 | 100 | 3 | 48 | n/a | n/a | 2317 |
| | | 7 | 48 | | | |
| | | 10 | 48 | | | |
| | | 17 | 66 | | | |
| | | 31 | 80 | | | |
| 682883 | 10.0 | 3 | 45 | GalNAc₃-3a | PO | 2317 |
| | | 7 | 37 | | | |
| | | 10 | 38 | | | |
| | | 17 | 42 | | | |
| | | 31 | 65 | | | |
| 682885 | 10.0 | 3 | 40 | GalNAc₃- | PO | 2317 |
| | | 7 | 33 | 10a | | |
| | | 10 | 34 | | | |
| | | 17 | 40 | | | |
| | | 31 | 64 | | | |

[1056] The results in Tables 88 and 89 show that the oligonucleotides comprising a GalNAc conjugate are more potent with a longer duration of action than the parent oligonucleotide lacking a conjugate (ISIS 420915).

### Example 88: Splicing Modulation In Vivo by Oligonucleotides Targeting SMN Comprising a GalNAc₃ Conjugate

[1057] The oligonucleotides listed in Table 90 were tested for splicing modulation of human survival of motor neuron (SMN) in mice.

TABLE 90
Modified ASOs targeting SMN

| ISIS | | GalNAc₃ | | SEQ |
|---|---|---|---|---|
| No. | Sequences (5′ to 3′) | Cluster | CM | ID No. |
| 387954 | AₑₛTₑₛTₑₛ^{m}CₑₛAₑₛ^{m}CₑₛTₑₛTₑₛTₑₛ^{m}CₑₛAₑₛTₑₛAₑₛAₑₛTₑₛGₑₛ^{m}CₑₛTₑₛGₑₛ | n/a | n/a | 2319 |
| | Gₑ | | | |
| 699819 | GalNAc₃-7ₐ-_{o′}AₑₛTₑₛTₑₛ^{m}CₑₛAₑₛ^{m}CₑₛTₑₛTₑₛTₑₛ^{m}CₑₛAₑₛTₑₛAₑₛAₑₛ | GalNAc₃-7a | PO | 2319 |
| | TₑₛGₑₛ^{m}CₑₛTₑₛGₑₛGₑ | | | |
| 699821 | GalNAc₃-7ₐ-_{o′}AₑₛTₑₒTₑₒ^{m}CₑₒAₑₒ^{m}CₑₒTₑₒTₑₒTₑₒ^{m}CₑₒAₑₒTₑₒAₑₒ | GalNAc₃-7a | PO | 2319 |
| | AₑₒTₑₒGₑₒ^{m}CₑₒTₑₛGₑₛGₑ | | | |
| 700000 | AₑₛTₑₛTₑₛ^{m}CₑₛAₑₛ^{m}CₑₛTₑₛTₑₛTₑₛ^{m}CₑₛAₑₛTₑₛAₑₛAₑₛTₑₛGₑₛ^{m}CₑₛTₑₛGₑₛ | GalNAc₃-1a | A_{d} | 2320 |
| | GₑₒA_{do′}-GalNAc₃-1ₐ | | | |
| 703421 | X-ATT^{m}CA^{m}CTTT^{m}CATAATG^{m}CTGG | n/a | n/a | 2319 |
| 703422 | GalNAc₃-7_{b}-X-ATT^{m}CA^{m}CTTT^{m}CATAATG^{m}CTGG | GalNAc₃-7b | n/a | 2319 |

The structure of GalNAc₃-7ₐ was shown previously in Example 48. “X” indicates a 5′ primary amine generated by Gene Tools (Philomath, Oreg.), and GalNAc₃-7_{b} indicates the structure of GalNAc₃-7ₐ lacking the —NH—C₆—O portion of the linker, as shown below:

[chemical structure]

[1058] ISIS numbers 703421 and 703422 are morphlino oligonucleotides, wherein each nucleotide of the two oligonucleotides is a morpholino nucleotide.

### Treatment

[1059] Six week old transgenic mice that express human SMN were injected subcutaneously once with an oligonucleotide listed in Table 91 or with saline. Each treatment group consisted of 2 males and 2 females. The mice were sacrificed 3 days following the dose to determine the liver human SMN mRNA levels both with and without exon 7 using real-time PCR according to standard protocols. Total RNA was measured using Ribogreen reagent. The SMN mRNA levels were normalized to total mRNA, and further normalized to the averages for the saline treatment group. The resulting average ratios of SMN mRNA including exon 7 to SMN mRNA missing exon 7 are shown in Table 91. The results show that fully modified oligonucleotides that modulate splicing and comprise a GalNAc conjugate are significantly more potent in altering splicing in the liver than the parent oligonucleotides lacking a GlaNAc conjugate. Furthermore, this trend is maintained for multiple modification chemistries, including 2′-MOE and morpholino modified oligonucleotides.

TABLE 91
Effect of oligonucleotides targeting human SMN in vivo

| | Dose | | GalNAc₃ | | SEQ |
|---|---|---|---|---|---|
| ISIS No. | (mg/kg) | +Exon 7/−Exon 7 | Cluster | CM | ID No. |
| Saline | n/a | 1.00 | n/a | n/a | n/a |
| 387954 | 32 | 1.65 | n/a | n/a | 2319 |
| 387954 | 288 | 5.00 | n/a | n/a | 2319 |
| 699819 | 32 | 7.84 | GalNAc₃-7a | PO | 2319 |
| 699821 | 32 | 7.22 | GalNAc₃-7a | PO | 2319 |
| 700000 | 32 | 6.91 | GalNAc₃-1a | A_{d} | 2320 |
| 703421 | 32 | 1.27 | n/a | n/a | 2319 |
| 703422 | 32 | 4.12 | GalNAc₃-7b | n/a | 2319 |

### Example 89: Antisense Inhibition In Vivo by Oligonucleotides Targeting Apolipoprotein a (Apo(a)) Comprising a GalNAc₃ Conjugate

[1060] The oligonucleotides listed in Table 92 below were tested in a study for dose-dependent inhibition of Apo(a) in transgenic mice.

TABLE 92
Modified ASOs targeting Apo(a)

| ISIS | | GalNAc₃ | | SEQ ID |
|---|---|---|---|---|
| No. | Sequences (5′ to 3′) | Cluster | CM | No. |
| 494372 | TₑₛGₑₛ^{m}CₑₛTₑₛ^{m}Cₑₛ^{m}C_{ds}G_{ds}T_{ds}T_{ds}G_{ds}G_{ds}T_{ds}G_{ds}^{m}C_{ds} | n/a | n/a | 2321 |
| | T_{ds}TₑₛGₑₛTₑₛTₑₛ^{m}Cₑ | | | |
| 681257 | GalNAc₃-7ₐ-_{o′}TₑₛGₑₒ^{m}CₑₒTₑₒ^{m}Cₑₒ^{m}C_{ds}G_{ds}T_{ds}T_{ds}G_{ds}G_{ds} | GalNAc₃-7a | PO | 2321 |
| | T_{ds}G_{ds}^{m}C_{ds} T_{ds}TₑₒGₑₒTₑₛTₑₛ^{m}Cₑ | | | |

The structure of GalNAc₃-7ₐ was shown in Example 48.

### Treatment

[1061] Eight week old, female C57BL/6 mice (Jackson Laboratory, Bar Harbor, Me.) were each injected subcutaneously once per week at a dosage shown below, for a total of six doses, with an oligonucleotide listed in Table 92 or with PBS. Each treatment group consisted of 3-4 animals. Tail bleeds were performed the day before the first dose and weekly following each dose to determine plasma Apo(a) protein levels. The mice were sacrificed two days following the final administration. Apo(a) liver mRNA levels were determined using real-time PCR and RIBOGREEN® RNA quantification reagent (Molecular Probes, Inc. Eugene, Oreg.) according to standard protocols. Apo(a) plasma protein levels were determined using ELISA, and liver transaminase levels were determined. The mRNA and plasma protein results in Table 93 are presented as the treatment group average percent relative to the PBS treated group. Plasma protein levels were further normalized to the baseline (BL) value for the PBS group. Average absolute transaminase levels and body weights (% relative to baseline averages) are reported in Table 94.

[1062] As illustrated in Table 93, treatment with the oligonucleotides lowered Apo(a) liver mRNA and plasma protein levels in a dose-dependent manner. Furthermore, the oligonucleotide comprising the GalNAc conjugate was significantly more potent with a longer duration of action than the parent oligonucleotide lacking a GalNAc conjugate. As illustrated in Table 94, transaminase levels and body weights were unaffected by the oligonucleotides, indicating that the oligonucleotides were well tolerated.

TABLE 93
Apo(a) liver mRNA and plasma protein levels

| ISIS | Dosage | Apo(a) mRNA | Apo(a) plasma protein (% PBS) | | | | | | |
|---|---|---|---|---|---|---|---|---|---|
| No. | (mg/kg) | (% PBS) | BL | Week 1 | Week 2 | Week 3 | Week 4 | Week 5 | Week 6 |
| PBS | n/a | 100 | 100 | 120 | 119 | 113 | 88 | 121 | 97 |
| 494372 | 3 | 80 | 84 | 89 | 91 | 98 | 87 | 87 | 79 |
| | 10 | 30 | 87 | 72 | 76 | 71 | 57 | 59 | 46 |
| | 30 | 5 | 92 | 54 | 28 | 10 | 7 | 9 | 7 |
| 681257 | 0.3 | 75 | 79 | 76 | 89 | 98 | 71 | 94 | 78 |
| | 1 | 19 | 79 | 88 | 66 | 60 | 54 | 32 | 24 |
| | 3 | 2 | 82 | 52 | 17 | 7 | 4 | 6 | 5 |
| | 10 | 2 | 79 | 17 | 6 | 3 | 2 | 4 | 5 |

TABLE 94

| | | | | Body weight |
|---|---|---|---|---|
| ISIS No. | Dosage (mg/kg) | ALT (U/L) | AST (U/L) | (% baseline) |
| PBS | n/a | 37 | 54 | 103 |
| 494372 | 3 | 28 | 68 | 106 |
| | 10 | 22 | 55 | 102 |
| | 30 | 19 | 48 | 103 |
| 681257 | 0.3 | 30 | 80 | 104 |
| | 1 | 26 | 47 | 105 |
| | 3 | 29 | 62 | 102 |
| | 10 | 21 | 52 | 107 |

### Example 90: Antisense Inhibition In Vivo by Oligonucleotides Targeting TTR Comprising a GalNAc₃ Conjugate

[1063] Oligonucleotides listed in Table 95 below were tested in a dose-dependent study for antisense inhibition of human transthyretin (TTR) in transgenic mice that express the human TTR gene.

### Treatment

[1064] TTR transgenic mice were each injected subcutaneously once per week for three weeks, for a total of three doses, with an oligonucleotide and dosage listed in Table 96 or with PBS. Each treatment group consisted of 4 animals. Prior to the first dose, a tail bleed was performed to determine plasma TTR protein levels at baseline (BL). The mice were sacrificed 72 hours following the final administration. TTR protein levels were measured using a clinical analyzer (AU480, Beckman Coulter, Calif.). Real-time PCR and RIBOGREEN® RNA quantification reagent (Molecular Probes, Inc. Eugene, Oreg.) were used according to standard protocols to determine liver human TTR mRNA levels. The results presented in Table 96 are the average values for each treatment group. The mRNA levels are the average values relative to the average for the PBS group. Plasma protein levels are the average values relative to the average value for the PBS group at baseline. “BL” indicates baseline, measurements that were taken just prior to the first dose. As illustrated in Table 96, treatment with antisense oligonucleotides lowered TTR expression levels in a dose-dependent manner. The oligonucleotides comprising a GalNAc conjugate were more potent than the parent lacking a GalNAc conjugate (ISIS 420915), and oligonucleotides comprising a phosphodiester or deoxyadenosine cleavable moiety showed significant improvements in potency compared to the parent lacking a conjugate (see ISIS numbers 682883 and 666943 vs 420915 and see Examples 86 and 87).

TABLE 95
Oligonucleotides targeting human TTR

| | | | GalNAc | | SEQ |
|---|---|---|---|---|---|
| Isis No. | Sequence 5′ to 3′ | Linkages | cluster | CM | ID No. |
| 420915 | Tₑₛ^{m}CₑₛTₑₛTₑₛGₑₛG_{ds}T_{ds}T_{ds}A_{ds}^{m}C_{ds}A_{ds}T_{ds}G_{ds}A_{ds}A_{ds} | PS | n/a | n/a | 2317 |
| | AₑₛTₑₛ^{m}Cₑₛ^{m}Cₑₛ^{m}Cₑ | | | | |
| 682883 | GalNAc₃-3_{a-o′}Tₑₛ^{m}CₑₒTₑₒTₑₒGₑₒG_{ds}T_{ds}T_{ds}A_{ds}^{m}C_{ds}A_{ds} | PS/PO | GalNAc₃-3a | PO | 2317 |
| | T_{ds}G_{ds}A_{ds}A_{ds}AₑₒTₑₒ^{m}Cₑₛ^{m}Cₑₛ^{m}Cₑ | | | | |
| 666943 | GalNAc₃-3_{a-o′}A_{do}Tₑₛ^{m}CₑₒTₑₒTₑₒGₑₒG_{ds}T_{ds}T_{ds}A_{ds} | PS/PO | GalNAc₃-3a | A_{d} | 2322 |
| | ^{m}C_{ds}A_{ds}T_{ds}G_{ds}A_{ds}A_{ds}AₑₒTₑₒ^{m}Cₑₛ^{m}Cₑₛ^{m}Cₑ | | | | |
| 682887 | GalNAc₃-7_{a-o′}A_{do}Tₑₛ^{m}CₑₒTₑₒTₑₒGₑₒG_{ds}T_{ds}T_{ds}A_{ds} | PS/PO | GalNAc₃-7a | A_{d} | 2322 |
| | ^{m}C_{ds}A_{ds}TₐₛG_{ds}A_{ds}A_{ds}AₑₒTₑₒ^{m}Cₑₛ^{m}Cₑₛ^{m}Cₑ | | | | |
| 682888 | GalNAc₃-10_{a-o′}A_{do}Tₑₛ^{m}CₑₒTₑₒTₑₒGₑₒG_{ds}T_{ds}T_{ds}A_{ds} | PS/PO | GalNAc₃-10a | A_{d} | 2322 |
| | ^{m}C_{ds}A_{ds}T_{ds}G_{ds}A_{ds}A_{ds}AₑₒTₑₒ^{m}Cₑₛ^{m}Cₑₛ^{m}Cₑ | | | | |
| 682889 | GalNAc₃-13_{a-o′}A_{do}Tₑₛ^{m}CₑₒTₑₒTₑₒGₑₒG_{ds}T_{ds}T_{ds}A_{ds} | PS/PO | GalNAc₃-13a | A_{d} | 2322 |
| | ^{m}C_{ds}A_{ds}T_{ds}G_{ds}A_{ds}A_{ds}AₑₒTₑₒ^{m}Cₑₛ^{m}Cₑₛ^{m}Cₑ | | | | |

The legend for Table 95 can be found in Example 74. The structure of GalNAc₃-3ₐ was shown in Example 39. The structure of GalNAc₃-7ₐ was shown in Example 48. The structure of GalNAc₃-10ₐ was shown in Example 46. The structure of GalNAc₃-13ₐ was shown in Example 62.

TABLE 96
Antisense inhibition of human TTR in vivo

| | | TTR | TTR | | |
|---|---|---|---|---|---|
| | | mRNA | protein | | |
| Isis No. | Dosage (mg/kg) | (% PBS) | (% BL) | GalNAc cluster | CM |
| PBS | n/a | 100 | 124 | n/a | n/a |
| 420915 | 6 | 69 | 114 | n/a | n/a |
| | 20 | 71 | 86 | | |
| | 60 | 21 | 36 | | |
| 682883 | 0.6 | 61 | 73 | GalNAc₃-3a | PO |
| | 2 | 23 | 36 | | |
| | 6 | 18 | 23 | | |
| 666943 | 0.6 | 74 | 93 | GalNAc₃-3a | A_{d} |
| | 2 | 33 | 57 | | |
| | 6 | 17 | 22 | | |
| 682887 | 0.6 | 60 | 97 | GalNAc₃-7a | A_{d} |
| | 2 | 36 | 49 | | |
| | 6 | 12 | 19 | | |
| 682888 | 0.6 | 65 | 92 | GalNAc₃-10a | A_{d} |
| | 2 | 32 | 46 | | |
| | 6 | 17 | 22 | | |
| 682889 | 0.6 | 72 | 74 | GalNAc₃-13a | A_{d} |
| | 2 | 38 | 45 | | |
| | 6 | 16 | 18 | | |

### Example 91: Antisense Inhibition In Vivo by Oligonucleotides Targeting Factor VII Comprising a GalNAc₃ Conjugate in Non-Human Primates

[1065] Oligonucleotides listed in Table 97 below were tested in a non-terminal, dose escalation study for antisense inhibition of Factor VII in monkeys.

### Treatment

[1066] Non-naïve monkeys were each injected subcutaneously on days 0, 15, and 29 with escalating doses of an oligonucleotide listed in Table 97 or with PBS. Each treatment group consisted of 4 males and 1 female. Prior to the first dose and at various time points thereafter, blood draws were performed to determine plasma Factor VII protein levels. Factor VII protein levels were measured by ELISA. The results presented in Table 98 are the average values for each treatment group relative to the average value for the PBS group at baseline (BL), the measurements taken just prior to the first dose. As illustrated in Table 98, treatment with antisense oligonucleotides lowered Factor VII expression levels in a dose-dependent manner, and the oligonucleotide comprising the GalNAc conjugate was significantly more potent in monkeys compared to the oligonucleotide lacking a GalNAc conjugate.

TABLE 97
Oligonucleotides targeting Factor VII

| | | | GalNAc | | SEQ |
|---|---|---|---|---|---|
| Isis No. | Sequence 5′ to 3′ | Linkages | cluster | CM | ID No. |
| 407935 | AₑₛTₑₛGₑₛ^{m}CₑₛAₑₛT_{ds}G_{ds}G_{ds}T_{ds}G_{ds}A_{ds}T_{ds}G_{ds}^{m}C_{ds}T_{ds} | PS | n/a | n/a | 2323 |
| | Tₑₛ^{m}CₑₛTₑₛGₑₛAₑ | | | | |
| 686892 | GalNAc₃-10_{a-o′}AₑₛTₑₛGₑₛ^{m}CₑₛAₑₛT_{ds}G_{ds}G_{ds}T_{ds}G_{ds} | PS | GalNAc₃-10a | PO | 2323 |
| | A_{ds}T_{ds}G_{ds}^{m}C_{ds}T_{ds}Tₑₛ^{m}CₑₛTₑₛGₑₛAₑ | | | | |

The legend for Table 97 can be found in Example 74. The structure of GalNAc₃-10ₐ was shown in Example 46.

TABLE 98
Factor VII plasma protein levels

| ISIS No. | Day | Dose (mg/kg) | Factor VII (% BL) |
|---|---|---|---|
| 407935 | 0 | n/a | 100 |
| | 15 | 10 | 87 |
| | 22 | n/a | 92 |
| | 29 | 30 | 77 |
| | 36 | n/a | 46 |
| | 43 | n/a | 43 |
| 686892 | 0 | 3 | 100 |
| | 15 | 10 | 56 |
| | 22 | n/a | 29 |
| | 29 | 30 | 19 |
| | 36 | n/a | 15 |
| | 43 | n/a | 11 |

### Example 92: Antisense Inhibition in Primary Hepatocytes by Antisense Oligonucleotides Targeting Apo-CIII Comprising a GalNAc₃ Conjugate

[1067] Primary mouse hepatocytes were seeded in 96-well plates at 15,000 cells per well, and the oligonucleotides listed in Table 99, targeting mouse ApoC-III, were added at 0.46, 1.37, 4.12, or 12.35, 37.04, 111.11, or 333.33 nM or 1.00 μM. After incubation with the oligonucleotides for 24 hours, the cells were lysed and total RNA was purified using RNeasy (Qiagen). ApoC-III mRNA levels were determined using real-time PCR and RIBOGREEN® RNA quantification reagent (Molecular Probes, Inc.) according to standard protocols. IC₅₀ values were determined using Prism 4 software (GraphPad). The results show that regardless of whether the cleavable moiety was a phosphodiester or a deoxyadensoine, the oligonucleotides comprising a GalNAc conjugate were significantly more potent than the parent oligonucleotide lacking a conjugate.

TABLE 99
Inhibition of mouse APOC-III expression in mouse primary hepatocytes

| ISIS | | | IC₅₀ | SEQ |
|---|---|---|---|---|
| No. | Sequence (5′ to 3′) | CM | (nM) | ID No. |
| 440670 | ^{m}CₑₛAₑₛGₑₛ^{m}CₑₛTₑₛT_{ds}T_{ds}A_{ds}T_{ds}T_{ds}A_{ds}G_{ds}G_{ds}G_{ds}A_{ds}^{m}CₑₛAₑₛGₑₛ^{m}CₑₛAₑ | n/a | 13.20 | 2324 |
| 661180 | ^{m}CₑₛAₑₛGₑₛ^{m}CₑₛTₑₛT_{ds}T_{ds}A_{ds}T_{ds}T_{ds}A_{ds}G_{ds}G_{ds}G_{ds}A_{ds}^{m}Cₑₛ | A_{d} | 1.40 | 2325 |
| | AₑₛGₑₛ^{m}CₑₛAₑₒA_{do′}-GalNAc₃-1ₐ | | | |
| 680771 | GalNAc₃-3_{a-o′}^{m}CₑₛAₑₛGₑₛ^{m}CₑₛTₑₛT_{ds}T_{ds}A_{ds}T_{ds}T_{ds}A_{ds}G_{ds}G_{ds}G_{ds}A_{ds}^{m}Cₑₛ | PO | 0.70 | 2324 |
| | AₑₛGₑₛ^{m}CₑₛAₑ | | | |
| 680772 | GalNAc₃-7_{a-o′}^{m}CₑₛAₑₛGₑₛ^{m}CₑₛTₑₛT_{ds}T_{ds}A_{ds}T_{ds}T_{ds}A_{ds}G_{ds}G_{ds}G_{ds}A_{ds}^{m}Cₑₛ | PO | 1.70 | 2324 |
| | AₑₛGₑₛ^{m}CₑₛAₑ | | | |
| 680773 | GalNAc₃-10_{a-o′}^{m}CₑₛAₑₛGₑₛ^{m}CₑₛTₑₛT_{ds}T_{ds}A_{ds}T_{ds}T_{ds}A_{ds}G_{ds}G_{ds}G_{ds}A_{ds}^{m}Cₑₛ | PO | 2.00 | 2324 |
| | AₑₛGₑₛ^{m}CₑₛAₑ | | | |
| 680774 | GalNAc₃-13_{a-o′}^{m}CₑₛAₑₛGₑₛ^{m}CₑₛTₑₛT_{ds}T_{ds}A_{ds}T_{ds}T_{ds}A_{ds}G_{ds}G_{ds}G_{ds}A_{ds}^{m}Cₑₛ | PO | 1.50 | 2324 |
| | AₑₛGₑₛ^{m}CₑₛAₑ | | | |
| 681272 | GalNAc₃-3_{a-o′}^{m}CₑₛAₑₒGₑₒ^{m}CₑₒTₑₒT_{ds}T_{ds}A_{ds}T_{ds}T_{ds}A_{ds}G_{ds}G_{ds}G_{ds}A_{ds}^{m}Cₑₒ | PO | <0.46 | 2324 |
| | AₑₒGₑₛ^{m}CₑₛAₑ | | | |
| 681273 | GalNAc₃-3ₐ-_{o′}A_{do}^{m}CₑₛAₑₛGₑₛ^{m}CₑₛTₑₛT_{ds}T_{ds}A_{ds}T_{ds}T_{ds}A_{ds}G_{ds}G_{ds}G_{ds}A_{ds} | A_{d} | 1.10 | 2324 |
| | ^{m}CₑₛAₑₛGₑₛ^{m}CₑₛAₑ | | | |
| 683733 | ^{m}CₑₛAₑₛGₑₛ^{m}CₑₛTₑₛT_{ds}T_{ds}A_{ds}T_{ds}T_{ds}A_{ds}G_{ds}G_{ds}G_{ds}A_{ds}^{m}Cₑₛ | A_{d} | 2.50 | 2325 |
| | AₑₛGₑₛ^{m}CₑₛAₑₒA_{do′}-GalNAc₃-19ₐ | | | |

[1068] The structure of GalNAc₃-1ₐ was shown previously in Example 9, GalNAc₃-3ₐ was shown in Example 39, GalNAc₃-7ₐ was shown in Example 48, GalNAc₃-10ₐ was shown in Example 46, GalNAc₃-13ₐ was shown in Example 62, and GalNAc₃-19ₐ was shown in Example 70.

### Example 93: Antisense Inhibition In Vivo by Oligonucleotides Targeting SRB-1 Comprising Mixed Wings and a 5′-GalNAc₃ Conjugate

[1069] The oligonucleotides listed in Table 100 were tested in a dose-dependent study for antisense inhibition of SRB-1 in mice.

TABLE 100
Modified ASOs targeting SRB-1

| ISIS | | GalNAc₃ | | SEQ |
|---|---|---|---|---|
| No. | Sequence (5′ to 3′) | Cluster | CM | ID No. |
| 449093 | TₖₛTₖₛ^{m}CₖₛA_{ds}G_{ds}T_{ds}^{m}C_{ds} A_{ds}T_{ds} G_{ds} A_{ds}^{m}C_{ds}T_{ds}Tₖₛ^{m}Cₖₛ^{m}Cₖ | n/a | n/a | 2326 |
| 699806 | GalNAc₃-3ₐ-_{o′}TₖₛTₖₛ^{m}CₖₛA_{ds}G_{ds}T_{ds}^{m}C_{ds} A_{ds}T_{ds} G_{ds}A_{ds}^{m}C_{ds} | GalNAc₃-3a | PO | 2326 |
| | T_{ds}Tₖₛ^{m}Cₖₛ^{m}Cₖ | | | |
| 699807 | GalNAc₃-7ₐ-_{o′}TₖₛTₖₛ^{m}CₖₛA_{ds}G_{ds}T_{ds}^{m}C_{ds} A_{ds}T_{ds} G_{ds}A_{ds}^{m}C_{ds} | GalNAc₃-7a | PO | 2326 |
| | T_{ds}Tₖₛ^{m}Cₖₛ^{m}Cₖ | | | |
| 699809 | GalNAc₃-7ₐ-_{o′} TₖₛTₖₛ^{m}CₖₛA_{ds}G_{ds}T_{ds}^{m}C_{ds} A_{ds}T_{ds} G_{ds} A_{ds}^{m}C_{ds} | GalNAc₃-7a | PO | 2326 |
| | T_{ds}Tₑₛ^{m}Cₑₛ^{m}Cₑ | | | |
| 699811 | GalNAc₃-7ₐ-_{o′}TₑₛTₑₛ^{m}CₑₛA_{ds}G_{ds}T_{ds}^{m}C_{ds} A_{ds}T_{ds} G_{ds}A_{ds}^{m}C_{ds} | GalNAc₃-7a | PO | 2326 |
| | T_{ds}Tₖₛ^{m}Cₖₛ^{m}Cₖ | | | |
| 699813 | GalNAc₃-7ₐ-_{o′}TₖₛT_{ds}^{m}CₖₛA_{ds}G_{ds}T_{ds}^{m}C_{ds} A_{ds}T_{ds} G_{ds}A_{ds}^{m}C_{ds} | GalNAc₃-7a | PO | 2326 |
| | T_{ds}Tₖₛ^{m}C_{ds}^{m}Cₖ | | | |
| 699815 | GalNAc₃-7ₐ-_{o′}TₑₛTₖₛ^{m}CₖₛA_{ds}G_{ds}T_{ds}^{m}C_{ds} A_{ds}T_{ds} G_{ds}A_{ds}^{m}C_{ds} | GalNAc₃-7a | PO | 2326 |
| | T_{ds}Tₖₛ^{m}Cₖₛ^{m}Cₑ | | | |

The structure of GalNAc₃-3ₐ was shown previously in Example 39, and the structure of GalNAc₃-7a was shown previously in Example 48. Subscripts: “e” indicates 2′-MOE modified nucleoside; “d” indicates β-D-2′-deoxyribonucleoside; “k” indicates 6′-(S)—CH₃ bicyclic nucleoside (cEt); “s” indicates phosphorothioate internucleoside linkages (PS); “o” indicates phosphodiester internucleoside linkages (PO). Superscript “m” indicates 5-methylcytosines.

### Treatment

[1070] Six to eight week old C57BL/6 mice (Jackson Laboratory, Bar Harbor, Me.) were injected subcutaneously once at the dosage shown below with an oligonucleotide listed in Table 100 or with saline. Each treatment group consisted of 4 animals. The mice were sacrificed 72 hours following the final administration. Liver SRB-1 mRNA levels were measured using real-time PCR. SRB-1 mRNA levels were normalized to cyclophilin mRNA levels according to standard protocols. The results are presented as the average percent of SRB-1 mRNA levels for each treatment group relative to the saline control group. As illustrated in Table 101, treatment with antisense oligonucleotides lowered SRB-1 mRNA levels in a dose-dependent manner, and the gapmer oligonucleotides comprising a GalNAc conjugate and having wings that are either full cEt or mixed sugar modifications were significantly more potent than the parent oligonucleotide lacking a conjugate and comprising full cEt modified wings.

[1071] Body weights, liver transaminases, total bilirubin, and BUN were also measured, and the average values for each treatment group are shown in Table 101. Body weight is shown as the average percent body weight relative to the baseline body weight (% BL) measured just prior to the oligonucleotide dose.

TABLE 101
SRB-1 mRNA, ALT, AST, BUN, and total bilirubin levels and
body weights

| | | SRB-1 | | | | | Body |
|---|---|---|---|---|---|---|---|
| ISIS | Dosage | mRNA | ALT | AST | | | weight |
| No. | (mg/kg) | (% PBS) | (U/L) | (U/L) | Bil | BUN | (% BL) |
| PBS | n/a | 100 | 31 | 84 | 0.15 | 28 | 102 |
| 449093 | 1 | 111 | 18 | 48 | 0.17 | 31 | 104 |
| | 3 | 94 | 20 | 43 | 0.15 | 26 | 103 |
| | 10 | 36 | 19 | 50 | 0.12 | 29 | 104 |
| 699806 | 0.1 | 114 | 23 | 58 | 0.13 | 26 | 107 |
| | 0.3 | 59 | 21 | 45 | 0.12 | 27 | 108 |
| | 1 | 25 | 30 | 61 | 0.12 | 30 | 104 |
| 699807 | 0.1 | 121 | 19 | 41 | 0.14 | 25 | 100 |
| | 0.3 | 73 | 23 | 56 | 0.13 | 26 | 105 |
| | 1 | 24 | 22 | 69 | 0.14 | 25 | 102 |
| 699809 | 0.1 | 125 | 23 | 57 | 0.14 | 26 | 104 |
| | 0.3 | 70 | 20 | 49 | 0.10 | 25 | 105 |
| | 1 | 33 | 34 | 62 | 0.17 | 25 | 107 |
| 699811 | 0.1 | 123 | 48 | 77 | 0.14 | 24 | 106 |
| | 0.3 | 94 | 20 | 45 | 0.13 | 25 | 101 |
| | 1 | 66 | 57 | 104 | 0.14 | 24 | 107 |
| 699813 | 0.1 | 95 | 20 | 58 | 0.13 | 28 | 104 |
| | 0.3 | 98 | 22 | 61 | 0.17 | 28 | 105 |
| | 1 | 49 | 19 | 47 | 0.11 | 27 | 106 |
| 699815 | 0.1 | 93 | 30 | 79 | 0.17 | 25 | 105 |
| | 0.3 | 64 | 30 | 61 | 0.12 | 26 | 105 |
| | 1 | 24 | 18 | 41 | 0.14 | 25 | 106 |

### Example 94: Antisense Inhibition In Vivo by Oligonucleotides Targeting SRB-1 Comprising 2′-Sugar Modifications and a 5′-GalNAc₃ Conjugate

[1072] The oligonucleotides listed in Table 102 were tested in a dose-dependent study for antisense inhibition of SRB-1 in mice.

TABLE 102
Modified ASOs targeting SRB-1

| ISIS | | GalNAc₃ | | SEQ |
|---|---|---|---|---|
| No. | Sequence (5′ to 3′) | Cluster | CM | ID No. |
| 353382 | Gₑₛ^{m}CₑₛTₑₛTₑₛ^{m}CₑₛA_{ds}G_{ds}T_{ds}^{m}C_{ds}A_{ds}T_{ds}G_{ds}A_{ds}^{m}C_{ds}T_{ds}Tₑₛ^{m}Cₑₛ^{m}Cₑₛ | n/a | n/a | 2304 |
| | TₑₛTₑ | | | |
| 700989 | GₘₛCₘₛUₘₛUₘₛCₘₛA_{ds}G_{ds}T_{ds}^{m}C_{ds}A_{ds}T_{ds}G_{ds}A_{ds}^{m}C_{ds}T_{ds}UₘₛCₘₛCₘₛ | n/a | n/a | 2327 |
| | UₘₛUₘ | | | |
| 666904 | GalNAc₃-3ₐ-_{o′}Gₑₛ^{m}CₑₛTₑₛTₑₛ^{m}CₑₛA_{ds}G_{ds}T_{ds}^{m}C_{ds}A_{ds}T_{ds}G_{ds}A_{ds} | GalNAc₃-3a | PO | 2304 |
| | ^{m}C_{ds}T_{ds}Tₑₛ^{m}Cₑₛ^{m}CₑₛTₑₛTₑ | | | |
| 700991 | GalNAc₃-7ₐ-ₒ′GₘₛCₘₛUₘₛUₘₛCₘₛA_{ds}G_{ds}T_{ds}^{m}C_{ds}A_{ds}T_{ds}G_{ds} | GalNAc₃-7a | PO | 2327 |
| | A_{ds}^{m}C_{ds}T_{ds}UₘₛCₘₛCₘₛUₘₛUₘ | | | |

Subscript “m” indicates a 2′-O-methyl modified nucleoside. See Example 74 for complete table legend. The structure of GalNAc₃-3ₐ was shown previously in Example 39, and the structure of GalNAc₃-7a was shown previously in Example 48.

### Treatment

[1073] The study was completed using the protocol described in Example 93. Results are shown in Table 103 below and show that both the 2′-MOE and 2′-OMe modified oligonucleotides comprising a GalNAc conjugate were significantly more potent than the respective parent oligonucleotides lacking a conjugate. The results of the body weights, liver transaminases, total bilirubin, and BUN measurements indicated that the compounds were all well tolerated.

TABLE 103
SRB-1 mRNA

| ISIS No. | Dosage (mg/kg) | SRB-1 mRNA (% PBS) |
|---|---|---|
| PBS | n/a | 100 |
| 353382 | 5 | 116 |
| | 15 | 58 |
| | 45 | 27 |
| 700989 | 5 | 120 |
| | 15 | 92 |
| | 45 | 46 |
| 666904 | 1 | 98 |
| | 3 | 45 |
| | 10 | 17 |
| 700991 | 1 | 118 |
| | 3 | 63 |
| | 10 | 14 |

### Example 95: Antisense Inhibition In Vivo by Oligonucleotides Targeting SRB-1 Comprising Bicyclic Nucleosides and a 5′-GalNAc₃ Conjugate

[1074] The oligonucleotides listed in Table 104 were tested in a dose-dependent study for antisense inhibition of SRB-1 in mice.

TABLE 104
Modified ASOs targeting SRB-1

| ISIS | | GalNAc₃ | | SEQ |
|---|---|---|---|---|
| No. | Sequences (5′ to 3′) | Cluster | CM | ID No |
| 440762 | Tₖₛ^{m}CₖₛA_{ds}G_{ds}T_{ds}^{m}C_{ds}A_{ds}T_{ds}G_{ds}A_{ds}^{m}C_{ds}T_{ds}Tₖₛ^{m}Cₖ | n/a | n/a | 2298 |
| 666905 | GalNAc₃-3ₐ-ₒ′Tₖₛ^{m}CₖₛA_{ds}G_{ds}T_{ds}^{m}C_{ds}A_{ds}T_{ds}G_{ds}A_{ds}^{m}C_{ds}T_{ds}Tₖₛ^{m}Cₖ | GalNAc₃-3ₐ | PO | 2298 |
| 699782 | GalNAc₃-7ₐ-ₒ′Tₖₛ^{m}CₖₛA_{ds}G_{ds}T_{ds}^{m}C_{ds}A_{ds}T_{ds}G_{ds}A_{ds}^{m}C_{ds}T_{ds}Tₖₛ^{m}Cₖ | GalNAc₃-7ₐ | PO | 2298 |
| 699783 | GalNAc₃-3ₐ-ₒ′Tₗₛ^{m}CₗₛA_{ds}G_{ds}T_{ds}^{m}C_{ds}A_{ds}T_{ds}G_{ds}A_{ds}^{m}C_{ds}T_{ds}Tₗₛ^{m}Cₗ | GalNAc₃-3ₐ | PO | 2298 |
| 653621 | Tₗₛ^{m}CₗₛA_{ds}G_{ds}T_{ds}^{m}C_{ds}A_{ds}T_{ds}G_{ds}A_{ds}^{m}C_{ds}T_{ds}Tₗₛ^{m}CₗₒA_{do′}-GalNAc₃-1a | GalNAc₃-1ₐ | A_{d} | 2299 |
| 439879 | T_{gs}^{m}C_{gs}A_{ds}G_{ds}T_{ds}^{m}C_{ds}A_{ds}T_{d} G_{ds}A_{ds}^{m}C_{ds}T_{ds}T_{gs}^{m}C_{g} | n/a | n/a | 2298 |
| 699789 | GalNAc₃-3ₐ-_{o′}T_{gs}^{m}C_{gs}A_{ds}G_{ds}T_{ds}^{m}C_{ds}A_{ds}T_{d} G_{ds}A_{ds}^{m}C_{ds}T_{ds}T_{gs}^{m}C_{g} | GalNAc₃-3ₐ | PO | 2298 |

Subscript “g” indicates a fluoro-HNA nucleoside, subscript “1” indicates a locked nucleoside comprising a 2′-O—CH₂-4′ bridge. See the Example 74 table legend for other abbreviations. The structure of GalNAc₃-1ₐ was shown previously in Example 9, the structure of GalNAc₃-3ₐ was shown previously in Example 39, and the structure of GalNAc₃-7a was shown previously in Example 48.

### Treatment

[1075] The study was completed using the protocol described in Example 93. Results are shown in Table 105 below and show that oligonucleotides comprising a GalNAc conjugate and various bicyclic nucleoside modifications were significantly more potent than the parent oligonucleotide lacking a conjugate and comprising bicyclic nucleoside modifications. Furthermore, the oligonucleotide comprising a GalNAc conjugate and fluoro-HNA modifications was significantly more potent than the parent lacking a conjugate and comprising fluoro-HNA modifications. The results of the body weights, liver transaminases, total bilirubin, and BUN measurements indicated that the compounds were all well tolerated.

TABLE 105
SRB-1 mRNA, ALT, AST, BUN, and total bilirubin levels
and body weights

| ISIS No. | Dosage (mg/kg) | SRB-1 mRNA (% PBS) |
|---|---|---|
| PBS | n/a | 100 |
| 440762 | 1 | 104 |
| | 3 | 65 |
| | 10 | 35 |
| 666905 | 0.1 | 105 |
| | 0.3 | 56 |
| | 1 | 18 |
| 699782 | 0.1 | 93 |
| | 0.3 | 63 |
| | 1 | 15 |
| 699783 | 0.1 | 105 |
| | 0.3 | 53 |
| | 1 | 12 |
| 653621 | 0.1 | 109 |
| | 0.3 | 82 |
| | 1 | 27 |
| 439879 | 1 | 96 |
| | 3 | 77 |
| | 10 | 37 |
| 699789 | 0.1 | 82 |
| | 0.3 | 69 |
| | 1 | 26 |

### Example 96: Plasma Protein Binding of Antisense Oligonucleotides Comprising a GalNAc₃ Conjugate Group

[1076] Oligonucleotides listed in Table 70 targeting ApoC-III and oligonucleotides in Table 106 targeting Apo(a) were tested in an ultra-filtration assay in order to assess plasma protein binding.

TABLE 106
Modified oligonucleotides targeting Apo(a)

| ISIS | | GalNAc₃ | | SEQ |
|---|---|---|---|---|
| No. | Sequences (5′ to 3′) | Cluster | CM | ID No |
| 494372 | TₑₛGₑₛ^{m}CₑₛTₑₛ^{m}Cₑₛ^{m}C_{ds}G_{ds}T_{ds}T_{ds}G_{ds}G_{ds}T_{ds}G_{ds}^{m}C_{ds}T_{ds}TₑₛGₑₛTₑₛ | n/a | n/a | 2321 |
| | Tₑₛ^{m}Cₑ | | | |
| 693401 | TₑₛGₑₒ^{m}CₑₒTₑₒ^{m}Cₑₒ^{m}C_{ds}G_{ds}T_{ds}T_{ds}G_{ds}G_{ds}T_{ds}G_{ds}^{m}C_{ds}T_{ds}TₑₒGₑₒTₑₛ | n/a | n/a | 2321 |
| | Tₑₛ^{m}Cₑ | | | |
| 681251 | GalNAc₃-7ₐ-_{o′}TₑₛGₑₛ^{m}CₑₛTₑₛ^{m}Cₑₛ^{m}C_{ds}G_{ds}T_{ds}T_{ds}G_{ds}G_{ds}T_{ds}G_{ds}^{m}C_{ds} | GalNAc₃-7ₐ | PO | 2321 |
| | T_{ds}TₑₛGₑₛTₑₛTₑₛ^{m}Cₑ | | | |
| 681257 | GalNAc₃-7ₐ-_{o′}TₑₛGₑₒ^{m}CₑₒTₑₒ^{m}Cₑₒ^{m}C_{ds}G_{ds}T_{ds}T_{ds}G_{ds}G_{ds}T_{ds}G_{ds}^{m}C_{ds} | GalNAc₃-7ₐ | PO | 2321 |
| | T_{ds}TₑₒGₑₒTₑₛTₑₛ^{m}Cₑ | | | |

See the Example 74 for table legend. The structure of GalNAc₃-7a was shown previously in Example 48.

[1077] Ultrafree-MC ultrafiltration units (30,000 NMWL, low-binding regenerated cellulose membrane, Millipore, Bedford, Mass.) were pre-conditioned with 300 μL of 0.5% Tween 80 and centrifuged at 2000 g for 10 minutes, then with 300 μL of a 300 μg/mL solution of a control oligonucleotide in H₂O and centrifuged at 2000 g for 16 minutes. In order to assess non-specific binding to the filters of each test oligonucleotide from Tables 70 and 106 to be used in the studies, 300 μL of a 250 ng/mL solution of oligonucleotide in H₂O at pH 7.4 was placed in the pre-conditioned filters and centrifuged at 2000 g for 16 minutes. The unfiltered and filtered samples were analyzed by an ELISA assay to determine the oligonucleotide concentrations. Three replicates were used to obtain an average concentration for each sample. The average concentration of the filtered sample relative to the unfiltered sample is used to determine the percent of oligonucleotide that is recovered through the filter in the absence of plasma (% recovery).

[1078] Frozen whole plasma samples collected in K3-EDTA from normal, drug-free human volunteers, cynomolgus monkeys, and CD-1 mice, were purchased from Bioreclamation LLC (Westbury, N.Y.). The test oligonucleotides were added to 1.2 mL aliquots of plasma at two concentrations (5 and 150 μg/mL). An aliquot (300 μL) of each spiked plasma sample was placed in a pre-conditioned filter unit and incubated at 37° C. for 30 minutes, immediately followed by centrifugation at 2000 g for 16 minutes. Aliquots of filtered and unfiltered spiked plasma samples were analyzed by an ELISA to determine the oligonucleotide concentration in each sample. Three replicates per concentration were used to determine the average percentage of bound and unbound oligonucleotide in each sample. The average concentration of the filtered sample relative to the concentration of the unfiltered sample is used to determine the percent of oligonucleotide in the plasma that is not bound to plasma proteins (% unbound). The final unbound oligonucleotide values are corrected for non-specific binding by dividing the % unbound by the % recovery for each oligonucleotide. The final % bound oligonucleotide values are determined by subtracting the final % unbound values from 100. The results are shown in Table 107 for the two concentrations of oligonucleotide tested (5 and 150 μg/mL) in each species of plasma. The results show that GalNAc conjugate groups do not have a significant impact on plasma protein binding. Furthermore, oligonucleotides with full PS internucleoside linkages and mixed PO/PS linkages both bind plasma proteins, and those with full PS linkages bind plasma proteins to a somewhat greater extent than those with mixed PO/PS linkages.

TABLE 107
Percent of modified oligonucleotide bound to plasma proteins

| | Human plasma | | Monkey plasma | | Mouse plasma | |
|---|---|---|---|---|---|---|
| ISIS | 5 | 150 | 5 | 150 | 5 | 150 |
| No. | μg/mL | μg/mL | μg/mL | μg/mL | μg/mL | μg/mL |
| 304801 | 99.2 | 98.0 | 99.8 | 99.5 | 98.1 | 97.2 |
| 663083 | 97.8 | 90.9 | 99.3 | 99.3 | 96.5 | 93.0 |
| 674450 | 96.2 | 97.0 | 98.6 | 94.4 | 94.6 | 89.3 |
| 494372 | 94.1 | 89.3 | 98.9 | 97.5 | 97.2 | 93.6 |
| 693401 | 93.6 | 89.9 | 96.7 | 92.0 | 94.6 | 90.2 |
| 681251 | 95.4 | 93.9 | 99.1 | 98.2 | 97.8 | 96.1 |
| 681257 | 93.4 | 90.5 | 97.6 | 93.7 | 95.6 | 92.7 |

### Example 97: Modified Oligonucleotides Targeting TTR Comprising a GalNAc₃ Conjugate Group

[1079] The oligonucleotides shown in Table 108 comprising a GalNAc conjugate were designed to target TTR.

TABLE 108
Modified oligonucleotides targeting TTR

| | | GalNAc₃ | | SEQ ID |
|---|---|---|---|---|
| ISIS No. | Sequences (5′ to 3′) | Cluster | CM | No |
| 666941 | GalNAc₃-3_{a-o′}A_{do} Tₑₛ ^{m}Cₑₛ Tₑₛ Tₑₛ Gₑₛ G_{ds} T_{ds} T_{ds} A_{ds} ^{m} C_{ds} | GalNAc₃-3 | A_{d} | 2322 |
| | A_{ds} T_{ds} G_{ds} A_{ds} A_{ds} Aₑₛ Tₑₛ ^{m}Cₑₛ ^{m}Cₑₛ ^{m}Cₑ | | | |
| 666942 | Tₑₛ ^{m}Cₑₒ Tₑₒ Tₑₒ Gₑₒ G_{ds} T_{ds} T_{ds} A_{ds} ^{m}C_{ds} A_{ds} T_{ds} G_{ds} A_{ds} A_{ds} | GalNAc₃-1 | A_{d} | 2318 |
| | Aₑₒ Tₑₒ ^{m}Cₑₛ ^{m}Cₑₛ ^{m}Cₑₒ A_{do′}-GalNAc₃-3ₐ | | | |
| 682876 | GalNAc₃-3_{a-o′}Tₑₛ ^{m}Cₑₛ Tₑₛ Tₑₛ Gₑₛ G_{ds} T_{ds} T_{ds} A_{ds} ^{m}C_{ds} A_{ds} T_{ds} | GalNAc₃-3 | PO | 2317 |
| | G_{ds} A_{ds} A_{ds} Aₑₛ Tₑₛ ^{m}Cₑₛ ^{m}Cₑₛ ^{m}Cₑ | | | |
| 682877 | GalNAc₃-7_{a-o′}Tₑₛ ^{m}Cₑₛ Tₑₛ Tₑₛ Gₑₛ G_{ds} T_{ds} T_{ds} A_{ds} ^{m}C_{ds} A_{ds} T_{ds} | GalNAc₃-7 | PO | 2317 |
| | G_{ds} A_{ds} A_{ds} Aₑₛ Tₑₛ ^{m}Cₑₛ ^{m}Cₑₛ ^{m}Cₑ | | | |
| 682878 | GalNAc₃-10_{a-o′}Tₑₛ ^{m}Cₑₛ Tₑₛ Tₑₛ Gₑₛ G_{ds} T_{ds} T_{ds} A_{ds} ^{m}C_{ds} A_{ds} | GalNAc₃-10 | PO | 2317 |
| | T_{ds} G_{ds} A_{ds} A_{ds} Aₑₛ Tₑₛ ^{m}Cₑₛ ^{m}Cₑₛ ^{m}Cₑ | | | |
| 682879 | GalNAc₃-13_{a-o′}Tₑₛ ^{m}Cₑₛ Tₑₛ Tₑₛ Gₑₛ G_{ds} T_{ds} T_{ds} A_{ds} ^{m}C_{ds} A_{ds} | GalNAc₃-13 | PO | 2317 |
| | T_{ds} G_{ds} A_{ds} A_{ds} Aₑₛ Tₑₛ ^{m}Cₑₛ ^{m}Cₑₛ ^{m}Cₑ | | | |
| 682880 | GalNAc₃-7_{a-o′}A_{do} Tₑₛ ^{m}Cₑₛ Tₑₛ Tₑₛ Gₑₛ G_{ds} T_{ds} T_{ds} A_{ds} ^{m}C_{ds} | GalNAc₃-7 | A_{d} | 2322 |
| | A_{ds} T_{ds} G_{ds} A_{ds} A_{ds} Aₑₛ Tₑₛ ^{m}Cₑₛ ^{m}Cₑₛ ^{m}Cₑ | | | |
| 682881 | GalNAc₃-10_{a-o′}A_{do} Tₑₛ ^{m}Cₑₛ Tₑₛ Tₑₛ Gₑₛ G_{ds} T_{ds} T_{ds} A_{ds} ^{m}C_{ds} | GalNAc₃-10 | A_{d} | 2322 |
| | A_{ds} T_{ds} G_{ds} A_{ds} A_{ds} Aₑₛ Tₑₛ ^{m}Cₑₛ ^{m}Cₑₛ ^{m}Cₑ | | | |
| 682882 | GalNAc₃-13_{a-o′}A_{do} Tₑₛ ^{m}Cₑₛ Tₑₛ Tₑₛ Gₑₛ G_{ds} T_{ds} T_{ds} A_{ds} ^{m}C_{ds} | GalNAc₃-13 | A_{d} | 2322 |
| | A_{ds} T_{ds} G_{ds} A_{ds} A_{ds} Aₑₛ Tₑₛ ^{m}Cₑₛ ^{m}Cₑₛ ^{m}Cₑ | | | |
| 684056 | Tₑₛ ^{m}Cₑₛ Tₑₛ Tₑₛ Gₑₛ G_{ds} T_{ds} T_{ds} A_{ds} ^{m}C_{ds} A_{ds} T_{ds} G_{ds} A_{ds} A_{ds} | GalNAc₃-19 | A_{d} | 2318 |
| | Aₑₛ Tₑₛ ^{m}Cₑₛ ^{m}Cₑₛ ^{m}Cₑₒ A_{do′}-GalNAc₃-19ₐ | | | |

[1080] The legend for Table 108 can be found in Example 74. The structure of GalNAc₃-1 was shown in Example 9. The structure of GalNAc₃-3ₐ was shown in Example 39. The structure of GalNAc₃-7ₐ was shown in Example 48. The structure of GalNAc₃-10ₐ was shown in Example 46. The structure of GalNAc₃-13ₐ was shown in Example 62. The structure of GalNAc₃-19ₐ was shown in Example 70.

### Example 98: Evaluation of Pro-Inflammatory Effects of Oligonucleotides Comprising a GalNAc Conjugate in hPMBC Assay

[1081] The oligonucleotides listed in Table 109 and were tested for pro-inflammatory effects in an hPMBC assay as described in Examples 23 and 24. (See Tables 30, 83, 95, and 108 for descriptions of the oligonucleotides.) ISIS 353512 is a high responder used as a positive control, and the other oligonucleotides are described in Tables 83, 95, and 108. The results shown in Table 109 were obtained using blood from one volunteer donor. The results show that the oligonucleotides comprising mixed PO/PS internucleoside linkages produced significantly lower pro-inflammatory responses compared to the same oligonucleotides having full PS linkages. Furthermore, the GalNAc conjugate group did not have a significant effect in this assay.

TABLE 109

| ISIS No. | Eₘₐₓ/EC₅₀ | GalNAc₃ cluster | Linkages | CM |
|---|---|---|---|---|
| 353512 | 3630 | n/a | PS | n/a |
| 420915 | 802 | n/a | PS | n/a |
| 682881 | 1311 | GalNAc₃-10 | PS | A_{d} |
| 682888 | 0.26 | GalNAc₃-10 | PO/PS | A_{d} |
| 684057 | 1.03 | GalNAc₃-19 | PO/PS | A_{d} |

### Example 99: Binding Affinities of Oligonucleotides Comprising a GalNAc Conjugate for the Asialoglycoprotein Receptor

[1082] The binding affinities of the oligonucleotides listed in Table 110 (see Table 76 for descriptions of the oligonucleotides) for the asialoglycoprotein receptor were tested in a competitive receptor binding assay. The competitor ligand, α1-acid glycoprotein (AGP), was incubated in 50 mM sodium acetate buffer (pH 5) with 1 U neuraminidase-agarose for 16 hours at 37° C., and >90% desialylation was confirmed by either sialic acid assay or size exclusion chromatography (SEC). Iodine monochloride was used to iodinate the AGP according to the procedure by Atsma et al. (see J Lipid Res. 1991 January; 32(1):173-81.) In this method, desialylated α1-acid glycoprotein (de-AGP) was added to 10 mM iodine chloride, Na¹²⁵I, and 1 M glycine in 0.25 M NaOH. After incubation for 10 minutes at room temperature, ¹²⁵I-labeled de-AGP was separated from free ¹²⁵I by concentrating the mixture twice utilizing a 3 KDMWCO spin column. The protein was tested for labeling efficiency and purity on a HPLC system equipped with an Agilent SEC-3 column (7.8×300 mm) and a β-RAM counter. Competition experiments utilizing ¹²⁵I-labeled de-AGP and various GalNAc-cluster containing ASOs were performed as follows. Human HepG2 cells (10⁶ cells/ml) were plated on 6-well plates in 2 ml of appropriate growth media. MEM media supplemented with 10% fetal bovine serum (FBS), 2 mM L-Glutamine and 10 mM HEPES was used. Cells were incubated 16-20 hours @ 37° C. with 5% and 10% CO₂ respectively. Cells were washed with media without FBS prior to the experiment. Cells were incubated for 30 min @37° C. with 1 ml competition mix containing appropriate growth media with 2% FBS, 10⁻⁸ M ¹²⁵I-labeled de-AGP and GalNAc-cluster containing ASOs at concentrations ranging from 10⁻¹¹ to 10⁻⁵ M. Non-specific binding was determined in the presence of 10⁻² M GalNAc sugar. Cells were washed twice with media without FBS to remove unbound ¹²⁵I-labeled de-AGP and competitor GalNAc ASO. Cells were lysed using Qiagen's RLT buffer containing 1% β-mercaptoethanol. Lysates were transferred to round bottom assay tubes after a brief 10 min freeze/thaw cycle and assayed on a γ-counter. Non-specific binding was subtracted before dividing ¹²⁵I protein counts by the value of the lowest GalNAc-ASO concentration counts. The inhibition curves were fitted according to a single site competition binding equation using a nonlinear regression algorithm to calculate the binding affinities (K_{D}'s).

[1083] The results in Table 110 were obtained from experiments performed on five different days. Results for oligonucleotides marked with superscript “a” are the average of experiments run on two different days. The results show that the oligonucleotides comprising a GalNAc conjugate group on the 5′-end bound the asialoglycoprotein receptor on human HepG2 cells with 1.5 to 16-fold greater affinity than the oligonucleotides comprising a GalNAc conjugate group on the 3′-end.

TABLE 110
Asialoglycoprotein receptor binding assay results

| | | Oligonucleotide end to | |
|---|---|---|---|
| | GalNAc | which GalNAc conjugate | |
| ISIS No. | conjugate | is attached | K_{D} (nM) |
| 661161^{a} | GalNAc₃-3 | 5′ | 3.7 |
| 666881^{a} | GalNAc₃-10 | 5′ | 7.6 |
| 666981 | GalNAc₃-7 | 5′ | 6.0 |
| 670061 | GalNAc₃-13 | 5′ | 7.4 |
| 655861^{a} | GalNAc₃-1 | 3′ | 11.6 |
| 677841^{a} | GalNAc₃-19 | 3′ | 60.8 |

### Example 100: Antisense Inhibition In Vivo by Oligonucleotides Comprising a GalNAc Conjugate Group Targeting Apo(a) In Vivo

[1084] The oligonucleotides listed in Table 111a below were tested in a single dose study for duration of action in mice.

TABLE 111a
Modified ASOs targeting APO(a)

| ISIS | | GalNAc₃ | | SEQ |
|---|---|---|---|---|
| No. | Sequences (5′ to 3′) | Cluster | CM | ID No. |
| 681251 | GalNAc₃-7ₐ-_{o′}TₑₛGₑₛ^{m}CₑₛTₑₛ^{m}Cₑₛ^{m}C_{ds}G_{ds}T_{ds}T_{ds}G_{ds}G_{ds} | GalNAc₃-7a | PO | 2321 |
| | T_{ds}G_{ds}^{m}C_{ds}T_{ds}TₑₛGₑₛTₑₛTₑₛ^{m}Cₑ | | | |
| 681257 | GalNAc₃-7ₐ-_{o′}TₑₛGₑₒ^{m}CₑₒTₑₒ^{m}Cₑₒ^{m}C_{ds}G_{ds}T_{ds}T_{ds}G_{ds}G_{ds} | GalNAc₃-7a | PO | 2321 |
| | T_{ds}G_{ds}^{m}C_{ds}T_{ds}TₑₒGₑₒTₑₛTₑₛ^{m}Cₑ | | | |

The structure of GalNAc₃-7ₐ was shown in Example 48.

### Treatment

[1085] Female transgenic mice that express human Apo(a) were each injected subcutaneously once per week, for a total of 6 doses, with an oligonucleotide and dosage listed in Table 111b or with PBS. Each treatment group consisted of 3 animals. Blood was drawn the day before dosing to determine baseline levels of Apo(a) protein in plasma and at 72 hours, 1 week, and 2 weeks following the first dose. Additional blood draws will occur at 3 weeks, 4 weeks, 5 weeks, and 6 weeks following the first dose. Plasma Apo(a) protein levels were measured using an ELISA. The results in Table 111b are presented as the average percent of plasma Apo(a) protein levels for each treatment group, normalized to baseline levels (% BL), The results show that the oligonucleotides comprising a GalNAc conjugate group exhibited potent reduction in Apo(a) expression. This potent effect was observed for the oligonucleotide that comprises full PS internucleoside linkages and the oligonucleotide that comprises mixed PO and PS linkages.

TABLE 111b
Apo(a) plasma protein levels

| | | Apo(a) at | | Apo(a) at |
|---|---|---|---|---|
| | | 72 hours | Apo(a) at 1 week | 3 weeks |
| ISIS No. | Dosage (mg/kg) | (% BL) | (% BL) | (% BL) |
| PBS | n/a | 116 | 104 | 107 |
| 681251 | 0.3 | 97 | 108 | 93 |
| | 1.0 | 85 | 77 | 57 |
| | 3.0 | 54 | 49 | 11 |
| | 10.0 | 23 | 15 | 4 |
| 681257 | 0.3 | 114 | 138 | 104 |
| | 1.0 | 91 | 98 | 54 |
| | 3.0 | 69 | 40 | 6 |
| | 10.0 | 30 | 21 | 4 |

### Example 101: Antisense Inhibition by Oligonucleotides Comprising a GalNAc Cluster Linked Via a Stable Moiety

[1086] The oligonucleotides listed in Table 112 were tested for inhibition of mouse APOC-III expression in vivo. C57Bl/6 mice were each injected subcutaneously once with an oligonucleotide listed in Table 112 or with PBS. Each treatment group consisted of 4 animals. Each mouse treated with ISIS 440670 received a dose of 2, 6, 20, or 60 mg/kg. Each mouse treated with ISIS 680772 or 696847 received 0.6, 2, 6, or 20 mg/kg. The GalNAc conjugate group of ISIS 696847 is linked via a stable moiety, a phosphorothioate linkage instead of a readily cleavable phosphodiester containing linkage. The animals were sacrificed 72 hours after the dose. Liver APOC-III mRNA levels were measured using real-time PCR. APOC-III mRNA levels were normalized to cyclophilin mRNA levels according to standard protocols. The results are presented in Table 112 as the average percent of APOC-III mRNA levels for each treatment group relative to the saline control group. The results show that the oligonucleotides comprising a GalNAc conjugate group were significantly more potent than the oligonucleotide lacking a conjugate group. Furthermore, the oligonucleotide comprising a GalNAc conjugate group linked to the oligonucleotide via a cleavable moiety (ISIS 680772) was even more potent than the oligonucleotide comprising a GalNAc conjugate group linked to the oligonucleotide via a stable moiety (ISIS 696847).

TABLE 112
Modified oligonucleotides targeting mouse APOC-III

| | | | | APOC-III | SEQ |
|---|---|---|---|---|---|
| ISIS | | | Dosage | mRNA | ID |
| No. | Sequences (5′ to 3′) | CM | (mg/kg) | (% PBS | No. |
| 440670 | ^{m}CₑₛAₑₛGₑₛ^{m}CₑₛTₑₛT_{ds}T_{ds}A_{ds}T_{ds}T_{ds}A_{ds} | n/a | 2 | 92 | 2324 |
| | G_{ds}G_{ds}G_{ds}A_{ds}^{m}CₑₛAₑₛGₑₛ^{m}CₑₛAₑ | | 6 | 86 | |
| | | | 20 | 59 | |
| | | | 60 | 37 | |
| 680772 | GalNAc₃-7_{a-o′}^{m}CₑₛAₑₛGₑₛ^{m}CₑₛTₑₛT_{ds}T_{ds}A_{ds} T_{ds}T_{ds}A_{ds}G_{ds} | PO | 0.6 | 79 | 2324 |
| | G_{ds}G_{ds}A_{ds}^{m}Cₑₛ AₑₛGₑₛ^{m}CₑₛAₑ | | 2 | 58 | |
| | | | 6 | 31 | |
| | | | 20 | 13 | |
| 696847 | GalNAc₃-7_{a-s′}^{m}CₑₛAₑₛGₑₛ^{m}CₑₛTₑₛT_{ds}T_{ds}A_{ds}T_{ds}T_{ds}A_{ds}G_{ds} | n/a | 0.6 | 83 | 2324 |
| | G_{ds}G_{ds}A_{ds}^{m}Cₑₛ AₑₛGₑₛ^{m}CₑₛAₑ | (PS) | 2 | 73 | |
| | | | 6 | 40 | |
| | | | 20 | 28 | |

The structure of GalNAc₃-7ₐ was shown in Example 48.

### Example 102: Distribution in Liver of Antisense Oligonucleotides Comprising a GalNAc Conjugate

[1087] The liver distribution of ISIS 353382 (see Table 36) that does not comprise a GalNAc conjugate and ISIS 655861 (see Table 36) that does comprise a GalNAc conjugate was evaluated. Male Balb/c mice were subcutaneously injected once with ISIS 353382 or 655861 at a dosage listed in Table 113. Each treatment group consisted of 3 animals except for the 18 mg/kg group for ISIS 655861, which consisted of 2 animals. The animals were sacrificed 48 hours following the dose to determine the liver distribution of the oligonucleotides. In order to measure the number of antisense oligonucleotide molecules per cell, a Ruthenium (II) tris-bipyridine tag (MSD TAG, Meso Scale Discovery) was conjugated to an oligonucleotide probe used to detect the antisense oligonucleotides. The results presented in Table 113 are the average concentrations of oligonucleotide for each treatment group in units of millions of oligonucleotide molecules per cell. The results show that at equivalent doses, the oligonucleotide comprising a GalNAc conjugate was present at higher concentrations in the total liver and in hepatocytes than the oligonucleotide that does not comprise a GalNAc conjugate. Furthermore, the oligonucleotide comprising a GalNAc conjugate was present at lower concentrations in non-parenchymal liver cells than the oligonucleotide that does not comprise a GalNAc conjugate. And while the concentrations of ISIS 655861 in hepatocytes and non-parenchymal liver cells were similar per cell, the liver is approximately 80% hepatocytes by volume. Thus, the majority of the ISIS 655861 oligonucleotide that was present in the liver was found in hepatocytes, whereas the majority of the ISIS 353382 oligonucleotide that was present in the liver was found in non-parenchymal liver cells.

TABLE 113

| | | | | Concentration in |
|---|---|---|---|---|
| | | Concentration | Concentration | non-parenchymal |
| | | in whole | in hepatocytes | liver cells |
| ISIS | Dosage | liver (molecules * | (molecules * | (molecules * |
| No. | (mg/kg) | 10\hat{ }6 per cell) | 10\hat{ }6 per cell) | 10\hat{ }6 per cell) |
| 353382 | 3 | 9.7 | 1.2 | 37.2 |
| | 10 | 17.3 | 4.5 | 34.0 |
| | 20 | 23.6 | 6.6 | 65.6 |
| | 30 | 29.1 | 11.7 | 80.0 |
| | 60 | 73.4 | 14.8 | 98.0 |
| | 90 | 89.6 | 18.5 | 119.9 |
| 655861 | 0.5 | 2.6 | 2.9 | 3.2 |
| | 1 | 6.2 | 7.0 | 8.8 |
| | 3 | 19.1 | 25.1 | 28.5 |
| | 6 | 44.1 | 48.7 | 55.0 |
| | 18 | 76.6 | 82.3 | 77.1 |

### Example 103: Duration of Action In Vivo of Oligonucleotides Targeting APOC-III Comprising a GalNAc₃ Conjugate

[1088] The oligonucleotides listed in Table 114 below were tested in a single dose study for duration of action in mice.

TABLE 114
Modified ASOs targeting APOC-III

| ISIS | | GalNAc₃ | | SEQ |
|---|---|---|---|---|
| No. | Sequences (5′ to 3′) | Cluster | CM | ID No. |
| 304801 | AₑₛGₑₛ^{m}CₑₛTₑₛTₑₛ^{m}C_{ds}T_{ds}T_{ds}G_{ds}T_{ds}^{m}C_{ds}^{m}C_{ds}A_{ds}G_{ds}^{m}C_{ds}TₑₛTₑₛ | n/a | n/a | 2296 |
| | TₑₛAₑₛTₑ | | | |
| 663084 | GalNAc₃-3ₐ-_{o′}A_{do}AₑₛGₑₒ^{m}CₑₒTₑₒTₑₒ^{m}C_{ds}T_{ds}T_{ds}G_{ds}T_{ds}^{m}C_{ds} | GalNAc₃-3a | A_{d} | 2312 |
| | ^{m}C_{ds}A_{ds}G_{ds}^{m}C_{ds}TₑₒTₑₒ TₑₛAₑₛTₑ | | | |
| 679241 | AₑₛGₑₒ^{m}CₑₒTₑₒTₑₒ^{m}C_{ds}T_{ds}T_{ds}G_{ds}T_{ds}^{m}C_{ds}^{m}C_{ds}A_{ds}G_{ds}^{m}C_{ds}TₑₒTₑₒ | GalNAc₃-19a | A_{d} | 2297 |
| | TₑₛAₑₛTₑₒA_{do′}-GalNAc₃-19ₐ | | | |

The structure of GalNAc₃-3ₐ was shown in Example 39, and GalNAc₃-19ₐ was shown in Example 70.

### Treatment

[1089] Female transgenic mice that express human APOC-III were each injected subcutaneously once with an oligonucleotide listed in Table 114 or with PBS. Each treatment group consisted of 3 animals. Blood was drawn before dosing to determine baseline and at 3, 7, 14, 21, 28, 35, and 42 days following the dose. Plasma triglyceride and APOC-III protein levels were measured as described in Example 20. The results in Table 115 are presented as the average percent of plasma triglyceride and APOC-III levels for each treatment group, normalized to baseline levels. A comparison of the results in Table 71 of example 79 with the results in Table 115 below show that oligonucleotides comprising a mixture of phosphodiester and phosphorothioate internucleoside linkages exhibited increased duration of action than equivalent oligonucleotides comprising only phosphorothioate internucleoside linkages.

TABLE 115
Plasma triglyceride and APOC-III protein levels in transgenic mice

| | | Time | | | | |
|---|---|---|---|---|---|---|
| | | point | | | | |
| | | (days | | APOC-III | | |
| ISIS | Dosage | post- | Triglycerides | protein (% | GalNAc₃ | |
| No. | (mg/kg) | dose) | (% baseline) | baseline) | Cluster | CM |
| PBS | n/a | 3 | 96 | 101 | n/a | n/a |
| | | 7 | 88 | 98 | | |
| | | 14 | 91 | 103 | | |
| | | 21 | 69 | 92 | | |
| | | 28 | 83 | 81 | | |
| | | 35 | 65 | 86 | | |
| | | 42 | 72 | 88 | | |
| 304801 | 30 | 3 | 42 | 46 | n/a | n/a |
| | | 7 | 42 | 51 | | |
| | | 14 | 59 | 69 | | |
| | | 21 | 67 | 81 | | |
| | | 28 | 79 | 76 | | |
| | | 35 | 72 | 95 | | |
| | | 42 | 82 | 92 | | |
| 663084 | 10 | 3 | 35 | 28 | GalNAc₃-3a | A_{d} |
| | | 7 | 23 | 24 | | |
| | | 14 | 23 | 26 | | |
| | | 21 | 23 | 29 | | |
| | | 28 | 30 | 22 | | |
| | | 35 | 32 | 36 | | |
| | | 42 | 37 | 47 | | |
| 679241 | 10 | 3 | 38 | 30 | GalNAc₃- | A_{d} |
| | | 7 | 31 | 28 | 19a | |
| | | 14 | 30 | 22 | | |
| | | 21 | 36 | 34 | | |
| | | 28 | 48 | 34 | | |
| | | 35 | 50 | 45 | | |
| | | 42 | 72 | 64 | | |

### Example 104: Synthesis of Oligonucleotides Comprising a 5′-GalNAc₂ Conjugate

[chemical structure]

[1091] Compound 120 is commercially available, and the synthesis of compound 126 is described in Example 49. Compound 120 (1 g, 2.89 mmol), HBTU (0.39 g, 2.89 mmol), and HOBt (1.64 g, 4.33 mmol) were dissolved in DMF (10 mL. and N,N-diisopropylethylamine (1.75 mL, 10.1 mmol) were added. After about 5 min, aminohexanoic acid benzyl ester (1.36 g, 3.46 mmol) was added to the reaction. After 3 h, the reaction mixture was poured into 100 mL of 1 M NaHSO4 and extracted with 2×50 mL ethyl acetate. Organic layers were combined and washed with 3×40 mL sat NaHCO₃ and 2× brine, dried with Na₂SO₄, filtered and concentrated. The product was purified by silica gel column chromatography (DCM:EA:Hex, 1:1:1) to yield compound 231. LCMS and NMR were consistent with the structure. Compounds 231 (1.34 g, 2.438 mmol) was dissolved in dichloromethane (10 mL) and trifluoracetic acid (10 mL) was added. After stirring at room temperature for 2 h, the reaction mixture was concentrated under reduced pressure and co-evaporated with toluene (3×10 mL). The residue was dried under reduced pressure to yield compound 232 as the trifuloracetate salt. The synthesis of compound 166 is described in Example 54. Compound 166 (3.39 g, 5.40 mmol) was dissolved in DMF (3 mL). A solution of compound 232 (1.3 g, 2.25 mmol) was dissolved in DMF (3 mL) and N,N-diisopropylethylamine (1.55 mL) was added. The reaction was stirred at room temperature for 30 minutes, then poured into water (80 mL) and the aqueous layer was extracted with EtOAc (2×100 mL). The organic phase was separated and washed with sat. aqueous NaHCO₃ (3×80 mL), 1 M NaHSO₄ (3×80 mL) and brine (2×80 mL), then dried (Na₂SO₄), filtered, and concentrated. The residue was purified by silica gel column chromatography to yield compound 233. LCMS and NMR were consistent with the structure. Compound 233 (0.59 g, 0.48 mmol) was dissolved in methanol (2.2 mL) and ethyl acetate (2.2 mL). Palladium on carbon (10 wt % Pd/C, wet, 0.07 g) was added, and the reaction mixture was stirred under hydrogen atmosphere for 3 h. The reaction mixture was filtered through a pad of Celite and concentrated to yield the carboxylic acid. The carboxylic acid (1.32 g, 1.15 mmol, cluster free acid) was dissolved in DMF (3.2 mL). To this N,N-diisopropylehtylamine (0.3 mL, 1.73 mmol) and PFPTFA (0.30 mL, 1.73 mmol) were added. After 30 min stirring at room temperature the reaction mixture was poured into water (40 mL) and extracted with EtOAc (2×50 mL). A standard work-up was completed as described above to yield compound 234. LCMS and NMR were consistent with the structure. Oligonucleotide 235 was prepared using the general procedure described in Example 46. The GalNAc₂ cluster portion (GalNAc₂-24ₐ) of the conjugate group GalNAc₂-24 can be combined with any cleavable moiety present on the oligonucleotide to provide a variety of conjugate groups. The structure of GalNAc₂-24 (GalNAc₂-24ₐ-CM) is shown below:

[chemical structure]

### Example 105: Synthesis of Oligonucleotides Comprising a GalNAc₁-25 Conjugate

[chemical structure]

[1093] The synthesis of compound 166 is described in Example 54. Oligonucleotide 236 was prepared using the general procedure described in Example 46. Alternatively, oligonucleotide 236 was synthesized using the scheme shown below, and compound 238 was used to form the oligonucleotide 236 using procedures described in Example 10.

[chemical structure]

The GalNAc₁ cluster portion (GalNAc₁-25ₐ) of the conjugate group GalNAc₁-25 can be combined with any cleavable moiety present on the oligonucleotide to provide a variety of conjugate groups. The structure of GalNAc₁-25 (GalNAc₁-25ₐ-CM) is shown below:

[chemical structure]

### Example 106: Antisense Inhibition In Vivo by Oligonucleotides Targeting SRB-1 Comprising a 5% GalNAc₂ or a 5′-GalNAc₃ Conjugate

[1094] Oligonucleotides listed in Tables 116 and 117 were tested in dose-dependent studies for antisense inhibition of SRB-1 in mice.

### Treatment

[1095] Six to week old, male C57BL/6 mice (Jackson Laboratory, Bar Harbor, Me.) were injected subcutaneously once with 2, 7, or 20 mg/kg of ISIS No. 440762; or with 0.2, 0.6, 2, 6, or 20 mg/kg of ISIS No. 686221, 686222, or 708561; or with saline. Each treatment group consisted of 4 animals. The mice were sacrificed 72 hours following the final administration. Liver SRB-1 mRNA levels were measured using real-time PCR. SRB-1 mRNA levels were normalized to cyclophilin mRNA levels according to standard protocols. The antisense oligonucleotides lowered SRB-1 mRNA levels in a dose-dependent manner, and the ED₅₀ results are presented in Tables 116 and 117. Although previous studies showed that trivalent GalNAc-conjugated oligonucleotides were significantly more potent than divalent GalNAc-conjugated oligonucleotides, which were in turn significantly more potent than monovalent GalNAc conjugated oligonucleotides (see, e.g., Khorev et al., Bioorg. & Med. Chem., Vol. 16, 5216-5231 (2008)), treatment with antisense oligonucleotides comprising monovalent, divalent, and trivalent GalNAc clusters lowered SRB-1 mRNA levels with similar potencies as shown in Tables 116 and 117.

TABLE 116
Modified oligonucleotides targeting SRB-1

| ISIS | | | ED₅₀ | SEQ |
|---|---|---|---|---|
| No. | Sequences (5′ to 3′) | GalNAc Cluster | (mg/kg) | ID No |
| 440762 | Tₖₛ^{m}CₖₛA_{ds}G_{ds}T_{ds}^{m}C_{ds}A_{ds}T_{ds}G_{ds}A_{ds}^{m}C_{ds}T_{ds}Tₖₛ^{m}Cₖ | n/a | 4.7 | 2298 |
| 686221 | GalNAc₂-24ₐ-_{o′}A_{do}Tₖₛ^{m}CₖₛA_{ds}G_{ds}T_{ds}^{m}C_{ds}A_{ds}T_{ds}G_{ds}A_{ds} | GalNAc₂-24ₐ | 0.39 | 2302 |
| | ^{m}C_{ds}T_{ds}Tₖₛ^{m}Cₖ | | | |
| 686222 | GalNAc₃-13ₐ-_{o′}A_{do}Tₖₛ^{m}CₖₛA_{ds}G_{ds}T_{ds}^{m}C_{ds}A_{ds}T_{ds}G_{ds}A_{ds} | GalNAc₃-13ₐ | 0.41 | 2302 |
| | ^{m}C_{ds}T_{ds}Tₖₛ^{m}Cₖ | | | |

See Example 93 for table legend. The structure of GalNAc₃-13a was shown in Example 62, and the structure of GalNAc₂-24a was shown in Example 104.

TABLE 117
Modified oligonucleotides targeting SRB-1

| ISIS | | | ED₅₀ | SEQ |
|---|---|---|---|---|
| No. | Sequences (5′ to 3′) | GalNAc Cluster | (mg/kg) | ID No |
| 440762 | Tₖₛ^{m}CₖₛA_{ds}G_{ds}T_{ds}^{m}C_{ds}A_{ds}T_{ds}G_{ds}A_{ds}^{m}C_{ds}T_{ds}Tₖₛ^{m}Cₖ | n/a | 5 | 2298 |
| 708561 | GalNAc₁-25ₐ-_{o′}Tₖₛ^{m}CₖₛA_{ds}G_{ds}T_{ds}^{m}C_{ds}A_{ds}T_{ds}G_{ds}A_{ds} | GalNAc₁-25ₐ | 0.4 | 2298 |
| | ^{m}C_{ds}T_{ds}Tₖₛ^{m}Cₖ | | | |

See Example 93 for table legend. The structure of GalNAc₁-25a was shown in Example 105.

[1096] The concentrations of the oligonucleotides in Tables 116 and 117 in liver were also assessed, using procedures described in Example 75. The results shown in Tables 117a and 117b below are the average total antisense oligonucleotide tissues levels for each treatment group, as measured by UV in units of μg oligonucleotide per gram of liver tissue. The results show that the oligonucleotides comprising a GalNAc conjugate group accumulated in the liver at significantly higher levels than the same dose of the oligonucleotide lacking a GalNAc conjugate group. Furthermore, the antisense oligonucleotides comprising one, two, or three GalNAc ligands in their respective conjugate groups all accumulated in the liver at similar levels. This result is surprising in view of the Khorev et al. literature reference cited above and is consistent with the activity data shown in Tables 116 and 117 above.

TABLE 117a
Liver concentrations of oligonucleotides comprising a GalNAc₂ or
GalNAc₃ conjugate group

| | Dosage | Antisense oligonucleotide | | |
|---|---|---|---|---|
| ISIS No. | (mg/kg) | (μg/g) | GalNAc cluster | CM |
| 440762 | 2 | 2.1 | n/a | n/a |
| | 7 | 13.1 | | |
| | 20 | 31.1 | | |
| 686221 | 0.2 | 0.9 | GalNAc₂-24ₐ | A_{d} |
| | 0.6 | 2.7 | | |
| | 2 | 12.0 | | |
| | 6 | 26.5 | | |
| 686222 | 0.2 | 0.5 | GalNAc₃-13ₐ | A_{d} |
| | 0.6 | 1.6 | | |
| | 2 | 11.6 | | |
| | 6 | 19.8 | | |

TABLE 117b
Liver concentrations of oligonucleotides comprising a
GalNAc₁ conjugate group

| | Dosage | Antisense oligonucleotide | | |
|---|---|---|---|---|
| ISIS No. | (mg/kg) | (μg/g) | GalNAc cluster | CM |
| 440762 | 2 | 2.3 | n/a | n/a |
| | 7 | 8.9 | | |
| | 20 | 23.7 | | |
| 708561 | 0.2 | 0.4 | GalNAc₁-25ₐ | PO |
| | 0.6 | 1.1 | | |
| | 2 | 5.9 | | |
| | 6 | 23.7 | | |
| | 20 | 53.9 | | |

### Example 107: Synthesis of Oligonucleotides Comprising a GalNAc₁-26 or GalNAc₁-27 Conjugate

[chemical structure]

[1098] Oligonucleotide 239 is synthesized via coupling of compound 47 (see Example 15) to acid 64 (see Example 32) using HBTU and DIEA in DMF. The resulting amide containing compound is phosphitylated, then added to the 5′-end of an oligonucleotide using procedures described in Example 10. The GalNAc₁ cluster portion (GalNAc₁-26ₐ) of the conjugate group GalNAc₁-26 can be combined with any cleavable moiety present on the oligonucleotide to provide a variety of conjugate groups. The structure of GalNAc₁-26 (GalNAc₁-26ₐ-CM) is shown below:

[chemical structure]

[1099] In order to add the GalNAc₁ conjugate group to the 3′-end of an oligonucleotide, the amide formed from the reaction of compounds 47 and 64 is added to a solid support using procedures described in Example 7. The oligonucleotide synthesis is then completed using procedures described in Example 9 in order to form oligonucleotide 240.

[chemical structure]

The GalNAc₁ cluster portion (GalNAc₁-27ₐ) of the conjugate group GalNAc₁-27 can be combined with any cleavable moiety present on the oligonucleotide to provide a variety of conjugate groups. The structure of GalNAc₁-27 (GalNAc₁-27ₐ-CM) is shown below:

[chemical structure]

### Example 108: Antisense Inhibition In Vivo by Oligonucleotides Comprising a GalNAc Conjugate Group Targeting Apo(a) In Vivo

[1100] The oligonucleotides listed in Table 118 below were tested in a single dose study in mice.

TABLE 118
Modified ASOs targeting APO(a)

| ISIS | | | | SEQ |
|---|---|---|---|---|
| No. | Sequences (5′ to 3′) | GalNAc₃ Cluster | CM | ID No. |
| 494372 | TₑₛGₑₛ^{m}CₑₛTₑₛ^{m}Cₑₛ^{m}C_{ds}G_{ds}T_{ds}T_{ds}G_{ds}G_{ds}T_{ds}G_{ds}^{m}C_{ds} | n/a | n/a | 2321 |
| | T_{ds}TₑₛGₑₛTₑₛTₑₛ^{m}Cₑ | | | |
| 681251 | GalNAc₃-7ₐ-_{o′}TₑₛGₑₛ^{m}CₑₛTₑₛ^{m}Cₑₛ^{m}C_{ds}G_{ds}T_{ds}T_{ds}G_{ds}G_{ds} | GalNAc₃-7a | PO | 2321 |
| | T_{ds}G_{ds}^{m}C_{ds}T_{ds}TₑₛGₑₛTₑₛTₑₛ^{m}Cₑ | | | |
| 681255 | GalNAc₃-3ₐ-_{o′}TₑₛGₑₒ^{m}CₑₒTₑₒ^{m}Cₑₒ^{m}C_{ds}G_{ds}T_{ds}T_{ds}G_{ds}G_{ds} | GalNAc₃-3a | PO | 2321 |
| | T_{ds}G_{ds}^{m}C_{ds}T_{ds}TₑₒGₑₒTₑₛTₑₛ^{m}Cₑ | | | |
| 681256 | GalNAc₃-10ₐ-_{o′}TₑₛGₑₒ^{m}CₑₒTₑₒ^{m}Cₑₒ^{m}C_{ds}G_{ds}T_{ds}T_{ds}G_{ds}G_{ds} | GalNAc₃-10a | PO | 2321 |
| | T_{ds}G_{ds}^{m}C_{ds}T_{ds}TₑₒGₑₒTₑₛTₑₛ^{m}Cₑ | | | |
| 681257 | GalNAc₃-7ₐ-_{o′}TₑₛGₑₒ^{m}CₑₒTₑₒ^{m}Cₑₒ^{m}C_{ds}G_{ds}T_{ds}T_{ds}G_{ds}G_{ds} | GalNAc₃-7a | PO | 2321 |
| | T_{ds}G_{ds}^{m}C_{ds}T_{ds}TₑₒGₑₒTₑₛTₑₛ^{m}Cₑ | | | |
| 681258 | GalNAc₃-13ₐ-_{o′}TₑₛGₑₒ^{m}CₑₒTₑₒ^{m}Cₑₒ^{m}C_{ds}G_{ds}T_{ds}T_{ds}G_{ds}G_{ds} | GalNAc₃-13a | PO | 2321 |
| | T_{ds}G_{ds}^{m}C_{ds}T_{ds}TₑₒGₑₒTₑₛTₑₛ^{m}Cₑ | | | |
| 681260 | TₑₛGₑₒ^{m}CₑₒTₑₒ^{m}Cₑₒ^{m}C_{ds}G_{ds}T_{ds}T_{ds}G_{ds}G_{ds}T_{ds}G_{ds}^{m}C_{ds}T_{ds}TₑₒGₑₒ | GalNAc₃-19a | A_{d} | 2328 |
| | TₑₛTₑₛ^{m}CₑₒA_{do′}-GalNAc₃-19 | | | |

The structure of GalNAc₃-7ₐ was shown in Example 48.

### Treatment

[1101] Male transgenic mice that express human Apo(a) were each injected subcutaneously once with an oligonucleotide and dosage listed in Table 119 or with PBS. Each treatment group consisted of 4 animals. Blood was drawn the day before dosing to determine baseline levels of Apo(a) protein in plasma and at 1 week following the first dose. Additional blood draws will occur weekly for approximately 8 weeks. Plasma Apo(a) protein levels were measured using an ELISA. The results in Table 119 are presented as the average percent of plasma Apo(a) protein levels for each treatment group, normalized to baseline levels (% BL), The results show that the antisense oligonucleotides reduced Apo(a) protein expression. Furthermore, the oligonucleotides comprising a GalNAc conjugate group exhibited even more potent reduction in Apo(a) expression than the oligonucleotide that does not comprise a conjugate group.

TABLE 119
Apo(a) plasma protein levels

| | | Apo(a) at 1 week |
|---|---|---|
| ISIS No. | Dosage (mg/kg) | (% BL) |
| PBS | n/a | 143 |
| 494372 | 50 | 58 |
| 681251 | 10 | 15 |
| 681255 | 10 | 14 |
| 681256 | 10 | 17 |
| 681257 | 10 | 24 |
| 681258 | 10 | 22 |
| 681260 | 10 | 26 |

### Example 109: Synthesis of Oligonucleotides Comprising a GalNAc₁-28 or GalNAc₁-29 Conjugate

[chemical structure]

[1103] Oligonucleotide 241 is synthesized using procedures similar to those described in Example 71 to form the phosphoramidite intermediate, followed by procedures described in Example 10 to synthesize the oligonucleotide. The GalNAc₁ cluster portion (GalNAc₁-28ₐ) of the conjugate group GalNAc₁-28 can be combined with any cleavable moiety present on the oligonucleotide to provide a variety of conjugate groups. The structure of GalNAc₁-28 (GalNAc₁-28ₐ-CM) is shown below:

[chemical structure]

[1104] In order to add the GalNAc₁ conjugate group to the 3′-end of an oligonucleotide, procedures similar to those described in Example 71 are used to form the hydroxyl intermediate, which is then added to the solid support using procedures described in Example 7. The oligonucleotide synthesis is then completed using procedures described in Example 9 in order to form oligonucleotide 242.

[chemical structure]

The GalNAc₁ cluster portion (GalNAc₁-29ₐ) of the conjugate group GalNAc₁-29 can be combined with any cleavable moiety present on the oligonucleotide to provide a variety of conjugate groups. The structure of GalNAc₁-29 (GalNAc₁-29ₐ-CM) is shown below:

[chemical structure]

### Example 110: Synthesis of Oligonucleotides Comprising a GalNAc₁-30 Conjugate

[chemical structure]

[1106] Oligonucleotide 246 comprising a GalNAc₁-30 conjugate group, wherein Y is selected from 0, S, a substituted or unsubstituted C₁-C₁₀ alkyl, amino, substituted amino, azido, alkenyl or alkynyl, is synthesized as shown above. The GalNAc₁ cluster portion (GalNAc₁-30ₐ) of the conjugate group GalNAc₁-30 can be combined with any cleavable moiety to provide a variety of conjugate groups. In certain embodiments, Y is part of the cleavable moiety. In certain embodiments, Y is part of a stable moiety, and the cleavable moiety is present on the oligonucleotide. The structure of GalNAc₁-30ₐ is shown below:

[chemical structure]

### Example 111: Synthesis of Oligonucleotides Comprising a GalNAc₂-31 or GalNAc₂-32 Conjugate

[chemical structure]

[1108] Oligonucleotide 250 comprising a GalNAc₂-31 conjugate group, wherein Y is selected from 0, S, a substituted or unsubstituted C₁-C₁₀ alkyl, amino, substituted amino, azido, alkenyl or alkynyl, is synthesized as shown above. The GalNAc₂ cluster portion (GalNAc₂-31ₐ) of the conjugate group GalNAc₂-31 can be combined with any cleavable moiety to provide a variety of conjugate groups. In certain embodiments, the Y-containing group directly adjacent to the 5′-end of the oligonucleotide is part of the cleavable moiety. In certain embodiments, the Y-containing group directly adjacent to the 5′-end of the oligonucleotide is part of a stable moiety, and the cleavable moiety is present on the oligonucleotide. The structure of GalNAc₂-31ₐ is shown below:

[chemical structure]

[1109] The synthesis of an oligonucleotide comprising a GalNAc₂-32 conjugate is shown below.

[chemical structure]

[1110] Oligonucleotide 252 comprising a GalNAc₂-32 conjugate group, wherein Y is selected from 0, S, a substituted or unsubstituted C₁-C₁₀ alkyl, amino, substituted amino, azido, alkenyl or alkynyl, is synthesized as shown above. The GalNAc₂ cluster portion (GalNAc₂-32ₐ) of the conjugate group GalNAc₂-32 can be combined with any cleavable moiety to provide a variety of conjugate groups. In certain embodiments, the Y-containing group directly adjacent to the 5′-end of the oligonucleotide is part of the cleavable moiety. In certain embodiments, the Y-containing group directly adjacent to the 5′-end of the oligonucleotide is part of a stable moiety, and the cleavable moiety is present on the oligonucleotide. The structure of GalNAc₂-32ₐ is shown below:

[chemical structure]

### Example 112: Modified Oligonucleotides Comprising a GalNAc₁ Conjugate

[1111] The oligonucleotides in Table 120 targeting SRB-1 were synthesized with a GalNAc₁ conjugate group in order to further test the potency of oligonucleotides comprising conjugate groups that contain one GalNAc ligand.

TABLE 120

| | | GalNAc | | SEQ |
|---|---|---|---|---|
| ISIS No. | Sequence (5′ to 3′) | cluster | CM | ID NO. |
| 711461 | GalNAc₁-25_{a-o′}A_{do} Gₑₛ ^{m}Cₑₛ Tₑₛ Tₑₛ ^{m}Cₑₛ A_{ds} G_{ds} T_{ds} ^{m}C_{ds} A_{ds} T_{ds} | GalNAc₁-25ₐ | A_{d} | 2306 |
| | G_{ds} A_{ds} ^{m}C_{ds} T_{ds} Tₑₛ ^{m}Cₑₛ ^{m}Cₑₛ Tₑₛ Tₑ | | | |
| 711462 | GalNAc₁-25_{a-o′}Gₑₛ ^{m}Cₑₛ Tₑₛ Tₑₛ ^{m}Cₑₛ A_{ds} G_{ds} T_{ds} ^{m}C_{ds} A_{ds} T_{ds} G_{ds} | GalNAc₁-25ₐ | PO | 2304 |
| | A_{ds} ^{m}C_{ds} T_{ds} Tₑₛ ^{m}Cₑₛ ^{m}Cₑₛ Tₑₛ Tₑ | | | |
| 711463 | GalNAc₁-25_{a-o′}Gₑₛ ^{m}Cₑₒ Tₑₒ Tₑₒ ^{m}Cₑₒ A_{ds} G_{ds} T_{ds} ^{m}C_{ds} A_{ds} T_{ds} | GalNAc₁-25ₐ | PO | 2304 |
| | G_{ds} A_{ds} ^{m}C_{ds} T_{ds} Tₑₒ ^{m}Cₑₒ ^{m}Cₑₛ Tₑₛ Tₑ | | | |
| 711465 | GalNAc₁-26_{a-o′}A_{do} Gₑₛ ^{m}Cₑₛ Tₑₛ Tₑₛ ^{m}Cₑₛ A_{ds} G_{ds} T_{ds} ^{m}C_{ds} A_{ds} T_{ds} | GalNAc₁-26ₐ | A_{d} | 2306 |
| | G_{ds} A_{ds} ^{m}C_{ds} T_{ds} Tₑₛ ^{m}Cₑₛ ^{m}Cₑₛ Tₑₛ Tₑ | | | |
| 711466 | GalNAc₁-26_{a-o′}Gₑₛ ^{m}Cₑₛ Tₑₛ Tₑₛ ^{m}Cₑₛ A_{ds} G_{ds} T_{ds} ^{m}C_{ds} A_{ds} T_{ds} G_{ds} | GalNAc₁-26ₐ | PO | 2304 |
| | A_{ds} ^{m}C_{ds} T_{ds} Tₑₛ ^{m}Cₑₛ ^{m}Cₑₛ Tₑₛ Tₑ | | | |
| 711467 | GalNAc₁-26_{a-o′}Gₑₛ ^{m}Cₑₒ Tₑₒ Tₑₒ ^{m}Cₑₒ A_{ds} G_{ds} T_{ds} ^{m}C_{ds} A_{ds} T_{ds} | GalNAc₁-26ₐ | PO | 2304 |
| | G_{ds} A_{ds} ^{m}C_{ds} T_{ds} Tₑₒ ^{m}Cₑₒ ^{m}Cₑₛ Tₑₛ Tₑ | | | |
| 711468 | GalNAc₁-28_{a-o′}A_{do} Gₑₛ ^{m}Cₑₛ Tₑₛ Tₑₛ ^{m}Cₑₛ A_{ds} G_{ds} T_{ds} ^{m}C_{ds} A_{ds} T_{ds} | GalNAc₁-28ₐ | A_{d} | 2306 |
| | G_{ds} A_{ds} ^{m}C_{ds} T_{ds} Tₑₛ ^{m}Cₑₛ ^{m}Cₑₛ Tₑₛ Tₑ | | | |
| 711469 | GalNAc₁-28_{a-o′}Gₑₛ ^{m}Cₑₛ Tₑₛ Tₑₛ ^{m}Cₑₛ A_{ds} G_{ds} T_{ds} ^{m}C_{ds} A_{ds} T_{ds} G_{ds} | GalNAc₁-28ₐ | PO | 2304 |
| | A_{ds} ^{m}C_{ds} T_{ds} Tₑₛ ^{m}Cₑₛ ^{m}Cₑₛ Tₑₛ Tₑ | | | |
| 711470 | GalNAc₁-28_{a-o′}Gₑₛ ^{m}Cₑₒ Tₑₒ Tₑₒ ^{m}Cₑₒ A_{ds} G_{ds} T_{ds} ^{m}C_{ds} A_{ds} T_{ds} | GalNAc₁-28ₐ | PO | 2304 |
| | G_{ds} A_{ds} ^{m}C_{ds} T_{ds} Tₑₒ ^{m}Cₑₒ ^{m}Cₑₛ Tₑₛ Tₑ | | | |
| 713844 | Gₑₛ ^{m}Cₑₛ Tₑₛ Tₑₛ ^{m}Cₑₛ A_{ds} G_{ds} T_{ds} ^{m}C_{ds} A_{ds} T_{ds} G_{ds} A_{ds} ^{m}C_{ds} T_{ds} | GalNAc₁-27ₐ | PO | 2304 |
| | Tₑₛ ^{m}Cₑₛ ^{m}Cₑₛ Tₑₛ T_{eo′-}GalNAc₁-27ₐ | | | |
| 713845 | Gₑₛ ^{m}Cₑₒ Tₑₒ Tₑₒ ^{m}Cₑₒ A_{ds} G_{ds} T_{ds} ^{m}C_{ds} A_{ds} T_{ds} G_{ds} A_{ds} ^{m}C_{ds} T_{ds} | GalNAc₁-27ₐ | PO | 2304 |
| | Tₑₒ ^{m}Cₑₒ ^{m}Cₑₛ Tₑₛ T_{eo′-}GalNAc₁-27ₐ | | | |
| 713846 | Gₑₛ ^{m}Cₑₒ Tₑₒ Tₑₒ ^{m}Cₑₒ A_{ds} G_{ds} T_{ds} ^{m}C_{ds} A_{ds} T_{ds} G_{ds} A_{ds} ^{m}C_{ds} T_{ds} | GalNAc₁-27ₐ | A_{d} | 2305 |
| | Tₑₒ ^{m}Cₑₒ ^{m}Cₑₛ Tₑₛ Tₑₒ A_{do′-}GalNAc₁-27ₐ | | | |
| 713847 | Gₑₛ ^{m}Cₑₛ Tₑₛ Tₑₛ ^{m}Cₑₛ A_{ds} G_{ds} T_{ds} ^{m}C_{ds} A_{ds} T_{ds} G_{ds} A_{ds} ^{m}C_{ds} T_{ds} | GalNAc₁-29ₐ | PO | 2304 |
| | Tₑₛ ^{m}Cₑₛ ^{m}Cₑₛ Tₑₛ T_{eo′-}GalNAc₁-29ₐ | | | |
| 713848 | Gₑₛ ^{m}Cₑₒ Tₑₒ Tₑₒ ^{m}Cₑₒ A_{ds} G_{ds} T_{ds} ^{m}C_{ds} A_{ds} T_{ds} G_{ds} A_{ds} ^{m}C_{ds} T_{ds} | GalNAc₁-29ₐ | PO | 2304 |
| | Tₑₒ ^{m}Cₑₒ ^{m}Cₑₛ Tₑₛ T_{eo′-}GalNAc₁-29ₐ | | | |
| 713849 | Gₑₛ ^{m}Cₑₛ Tₑₛ Tₑₛ ^{m}Cₑₛ A_{ds} G_{ds} T_{ds} ^{m}C_{ds} A_{ds} T_{ds} G_{ds} A_{ds} ^{m}C_{ds} T_{ds} | GalNAc₁-29ₐ | A_{d} | 2305 |
| | Tₑₛ ^{m}Cₑₛ ^{m}Cₑₛ Tₑₛ Tₑₒ A_{do′-}GalNAc₁-29ₐ | | | |
| 713850 | Gₑₛ ^{m}Cₑₒ Tₑₒ Tₑₒ ^{m}Cₑₒ A_{ds} G_{ds} T_{ds} ^{m}C_{ds} A_{ds} T_{ds} G_{ds} A_{ds} ^{m}C_{ds} T_{ds} | GalNAc₁-29ₐ | A_{d} | 2305 |
| | Tₑₒ ^{m}Cₑₒ ^{m}Cₑₛ Tₑₛ Tₑₒ A_{do′-}GalNAc₁-29ₐ | | | |

### Example 113: Antisense Oligonucleotides Targeting Growth Hormone Receptor and Comprising a GalNAc Cluster

[1112] The oligonucleotides in Table 121 were designed to target human growth hormone receptor (GHR).

TABLE 121

| Sequences (5′ to 3′) | SEQ ID No. |
|---|---|
| GalNAc₃-3-^{m}Cₑₛ^{m}CₑₛAₑₛ^{m}Cₑₛ^{m}CₑₛT_{ds}T_{ds}T_{ds}G_{ds}G_{ds}G_{ds}T_{ds}G_{ds}A_{ds}A_{ds}TₑₛAₑₛGₑₛ^{m}CₑₛAₑ | 703 |
| GalNAc₃-3-^{m}Cₑₛ^{c}CₑₒAₑₒ^{m}Cₑₒ^{m}CₑₒT_{ds}T_{ds}T_{ds}G_{ds}G_{ds}G_{ds}T_{ds}G_{ds}A_{ds}A_{ds}TₑₒAₑₒGₑₛ^{m}CₑₛAₑ | 703 |
| GalNAc₃-7-^{m}Cₑₛ^{m}CₑₛAₑₛ^{m}Cₑₛ^{m}CₑₛT_{ds}T_{ds}T_{ds}G_{ds}G_{ds}G_{ds}T_{ds}G_{ds}A_{ds}A_{ds}TₑₛAₑₛGₑₛ^{m}CₑₛAₑ | 703 |
| GalNAc₃-7-^{m}Cₑₛ^{m}CₑₒAₑₒ^{m}Cₑₒ^{m}CₑₒT_{ds}T_{ds}T_{ds}G_{ds}G_{ds}G_{ds}T_{ds}G_{ds}A_{ds}A_{ds}TₑₒAₑₒGₑₛ^{m}CₑₛAₑ | 703 |
| GalNAc₃-10-^{m}Cₑₛ^{m}CₑₛAₑₛ^{m}Cₑₛ^{m}CₑₛT_{ds}T_{ds}T_{ds}G_{ds}G_{ds}G_{ds}T_{ds}G_{ds}A_{ds}A_{ds}TₑₛAₑₛGₑₛ^{m}CₑₛAₑ | 703 |
| GalNAc₃-10-^{m}Cₑₛ^{m}CₑₒAₑₒ^{m}Cₑₒ^{m}CₑₒT_{ds}T_{ds}T_{ds}G_{ds}G_{ds}G_{ds}T_{ds}G_{ds}A_{ds}A_{ds}TₑₒAₑₒGₑₛ^{m}CₑₛAₑ | 703 |
| GalNAc₃-13-^{m}Cₑₛ^{m}CₑₛAₑₛ^{m}Cₑₛ^{m}CₑₛT_{ds}T_{ds}T_{ds}G_{ds}G_{ds}G_{ds}T_{ds}G_{ds}A_{ds}A_{ds}TₑₛAₑₛGₑₛ^{m}CₑₛAₑ | 703 |
| GalNAc₃-13-^{m}Cₑₛ^{m}CₑₒAₑₒ^{m}Cₑₒ^{m}CₑₒT_{ds}T_{ds}T_{ds}G_{ds}G_{ds}G_{ds}T_{ds}G_{ds}A_{ds}A_{ds}TₑₒAₑₒGₑₛ^{m}CₑₛAₑ | 703 |
| ^{m}Cₑₛ^{m}CₑₛAₑₛ^{m}Cₑₛ^{m}CₑₛT_{ds}T_{ds}T_{ds}G_{ds}G_{ds}G_{ds}T_{ds}G_{ds}A_{ds}A_{ds}TₑₛAₑₛGₑₛ^{m}CₑₛAₑ-GalNAc₃-19 | 703 |
| ^{m}Cₑₛ^{m}CₑₒAₑₒ^{m}Cₑₒ^{m}CₑₒT_{ds}T_{ds}T_{ds}G_{ds}G_{ds}G_{ds}T_{ds}G_{ds}A_{ds}A_{ds}TₑₒAₑₒGₑₛ^{m}CₑₛAₑ-GalNAc₃-19 | 703 |

### Example 114: Antisense Inhibition of Human Growth Hormone Receptor in Hep3B Cells by MOE Gapmers

[1113] Antisense oligonucleotides were designed targeting a growth hormone receptor (GHR) nucleic acid and were tested for their effects on GHR mRNA in vitro. The antisense oligonucleotides were tested in a series of experiments that had similar culture conditions. The results for each experiment are presented in separate tables shown below. Cultured Hep3B cells at a density of 20,000 cells per well were transfected using electroporation with 4,500 nM antisense oligonucleotide. After a treatment period of approximately 24 hours, RNA was isolated from the cells and GHR mRNA levels were measured by quantitative real-time PCR. Human primer probe set RTS3437_MGB (forward sequence CGAGTTCAGTGAGGTGCTCTATGT, designated herein as SEQ ID NO: 2329; reverse sequence AAGAGCCATGGAAAGTAGAAATCTTC, designated herein as SEQ ID NO: 2330; probe sequence TTCCTCAGATGAGCCAATT, designated herein as SEQ ID NO: 2331) was used to measure mRNA levels. GHR mRNA levels were adjusted according to total RNA content, as measured by RIBOGREEN®. Results are presented as percent inhibition of GHR, relative to untreated control cells.

[1114] The newly designed chimeric antisense oligonucleotides in the Tables below were designed as 5-10-5 MOE or 3-10-4 MOE gapmers. The 5-10-5 MOE gapmers are 20 nucleosides in length, wherein the central gap segment comprises of ten 2′-deoxynucleosides and is flanked by wing segments on the 5′ direction and the 3′ direction comprising five nucleosides each. The 3-10-4 MOE gapmers are 17 nucleosides in length, wherein the central gap segment comprises of ten 2′-deoxynucleosides and is flanked by wing segments on the 5′ direction and the 3′ direction comprising three and four nucleosides respectively. Each nucleoside in the 5′ wing segment and each nucleoside in the 3′ wing segment has a 2′-MOE modification. The internucleoside linkages throughout each gapmer are phosphorothioate (P═S) linkages. All cytosine residues throughout each gapmer are 5-methylcytosines. “Start site” indicates the 5′-most nucleoside to which the gapmer is targeted in the human gene sequence. “Stop site” indicates the 3′-most nucleoside to which the gapmer is targeted human gene sequence. Each gapmer listed in the Tables below is targeted to either the human GHR mRNA, designated herein as SEQ ID NO: 1 (GENBANK Accession No. NM_000163.4) or the human GHR genomic sequence, designated herein as SEQ ID NO: 2 (GENBANK Accession No. NT_006576.16 truncated from nucleotides 42411001 to 42714000). ‘n/a’ indicates that the antisense oligonucleotide does not target that particular gene sequence with 100% complementarity. In case the sequence alignment for a target gene in a particular table is not shown, it is understood that none of the oligonucleotides presented in that table align with 100% complementarity with that target gene.

TABLE 122
Inhibition of GHR mRNA by 5-10-5 MOE gapmers targeting
exonic regions of SEQ ID NO: 1 and 2

| | SEQ | SEQ | | | | SEQ | SEQ | |
|---|---|---|---|---|---|---|---|---|
| | ID | ID | | | | ID | ID | |
| | NO: 1 | NO: 1 | | | | NO: 2 | NO: 2 | SEQ |
| | Start | Stop | Target | | % | Start | Stop | ID |
| ISIS NO | Site | Site | Region | Sequence | inhibition | Site | Site | NO |
| 523266 | 164 | 183 | Exon 1 | ACCTCCGAGCTTCGCCTCTG | 64 | 3040 | 3059 | 20 |
| 523267 | 171 | 190 | Exon- | CTGTAGGACCTCCGAGCTTC | 31 | n/a | n/a | 21 |
| | | | exon | | | | | |
| | | | junction | | | | | |
| 523268 | 178 | 197 | Exon- | TCCATACCTGTAGGACCTCC | 37 | n/a | n/a | 22 |
| | | | exon | | | | | |
| | | | junction | | | | | |
| 523271 | 206 | 225 | Exon 2 | TGCCAAGGTCAACAGCAGCT | 80 | 144990 | 145009 | 23 |
| 523272 | 213 | 232 | Exon 2 | CTGCCAGTGCCAAGGTCAAC | 53 | 144997 | 145016 | 24 |
| 523273 | 220 | 239 | Exon 2 | CTTGATCCTGCCAGTGCCAA | 49 | 145004 | 145023 | 25 |
| 523274 | 227 | 246 | Exon 2 | AGCATCACTTGATCCTGCCA | 67 | 145011 | 145030 | 26 |
| 523275 | 234 | 253 | Exon 2 | CAGAAAAAGCATCACTTGAT | 0 | 145018 | 145037 | 27 |
| 523276 | 241 | 260 | Exon 2 | TCACTTCCAGAAAAAGCATC | 1 | 145025 | 145044 | 28 |
| 523284 | 361 | 380 | Exon 4 | GTCTCTCGCTCAGGTGAACG | 48 | 268024 | 268043 | 29 |
| 523285 | 368 | 387 | Exon 4 | TGAAAAAGTCTCTCGCTCAG | 15 | 268031 | 268050 | 30 |
| 523286 | 375 | 394 | Exon 4 | AGTGGCATGAAAAAGTCTCT | 14 | 268038 | 268057 | 31 |
| 523287 | 382 | 401 | Exon 4 | TCTGTCCAGTGGCATGAAAA | 4 | 268045 | 268064 | 32 |
| 523301 | 625 | 644 | Exon 6 | GGATCTGGTTGCACTATTTC | 36 | n/a | n/a | 33 |
| 523302 | 632 | 651 | Exon 6 | AATGGGTGGATCTGGTTGCA | 28 | 278926 | 278945 | 34 |
| 523303 | 647 | 666 | Exon 6 | AGTCCAGTTGAGGGCAATGG | 26 | 278941 | 278960 | 35 |
| 523304 | 654 | 673 | Exon 6 | TCAGTAAAGTCCAGTTGAGG | 0 | 278948 | 278967 | 36 |
| 523305 | 675 | 694 | Exon 6 | GAATCCCAGTTAAACTGACG | 19 | 278969 | 278988 | 37 |
| 523306 | 682 | 701 | Exon 6 | TCTGCATGAATCCCAGTTAA | 39 | 278976 | 278995 | 38 |
| 523309 | 736 | 755 | Exon 6 | ATCCATCCTTTCTGAATATC | 34 | 279030 | 279049 | 39 |
| 523310 | 743 | 762 | Exon 6 | CAGAACCATCCATCCTTTCT | 31 | 279037 | 279056 | 40 |
| 523311 | 750 | 769 | Exon 6 | CATACTCCAGAACCATCCAT | 44 | 279044 | 279063 | 41 |
| 523312 | 757 | 776 | Exon 6 | TGAAGTTCATACTCCAGAAC | 23 | 279051 | 279070 | 42 |
| 523313 | 764 | 783 | Exon 6 | TTTGTATTGAAGTTCATACT | 6 | 279058 | 279077 | 43 |
| 523314 | 771 | 790 | Exon 6 | TTACTTCTTTGTATTGAAGT | 0 | 279065 | 279084 | 44 |
| 523315 | 778 | 797 | Exon 6 | GTTTCATTTACTTCTTTGTA | 3 | 279072 | 279091 | 45 |
| 523316 | 785 | 804 | Exon 6 | CCATTTAGTTTCATTTACTT | 0 | 279079 | 279098 | 46 |
| 523317 | 792 | 811 | Exon 4- | TCATTTTCCATTTAGTTTCA | 19 | n/a | n/a | 47 |
| | | | exon 5 | | | | | |
| | | | junction | | | | | |
| 523323 | 862 | 881 | Exon 7 | ACACGCACTTCATATTCCTT | 63 | 290360 | 290379 | 48 |
| 523324 | 869 | 888 | Exon 7 | GGATCTCACACGCACTTCAT | 80 | 290367 | 290386 | 49 |
| 523328 | 926 | 945 | Exon 7 | AAGTGTTACATAGAGCACCT | 56 | 290424 | 290443 | 50 |
| 523329 | 933 | 952 | Exon 7 | TCTGAGGAAGTGTTACATAG | 53 | 290431 | 290450 | 51 |
| 523330 | 957 | 976 | Exon 7 | CTTCTTCACATGTAAATTGG | 32 | 290455 | 290474 | 52 |
| 523331 | 964 | 983 | Exon 5- | TAGAAATCTTCTTCACATGT | 4 | n/a | n/a | 53 |
| | | | exon 6 | | | | | |
| | | | junction | | | | | |
| 523332 | 971 | 990 | Exon 5- | TGGAAAGTAGAAATCTTCTT | 9 | n/a | n/a | 54 |
| | | | exon 6 | | | | | |
| | | | junction | | | | | |
| 523333 | 978 | 997 | Exon 8 | AGAGCCATGGAAAGTAGAAA | 46 | 292532 | 292551 | 55 |
| 523334 | 985 | 1004 | Exon 8 | ATAATTAAGAGCCATGGAAA | 0 | 292539 | 292558 | 56 |

TABLE 123
Inhibition of GHR mRNA by 5-10-5 MOE gapmers targeting
exonic regions of SEQ ID NO: 1 and 2

| | SEQ ID | SEQ ID | | | | SEQ ID | SEQ ID | |
|---|---|---|---|---|---|---|---|---|
| | NO: 1 | NO: 1 | | | | NO: 2 | NO: 2 | SEQ |
| ISIS | Start | Stop | Target | | % | Start | Stop | ID |
| NO | Site | Site | Region | Sequence | inhibition | Site | Site | NO |
| 523421 | 2072 | 2091 | exon 10 | CAGTTGGTCTGTGCTCACAT | 76 | 298489 | 298508 | 57 |
| 533002 | 207 | 226 | exon 2 | GTGCCAAGGTCAACAGCAGC | 63 | 144991 | 145010 | 58 |
| 533003 | 208 | 227 | exon 2 | AGTGCCAAGGTCAACAGCAG | 62 | 144992 | 145011 | 59 |
| 533004 | 225 | 244 | exon 2 | CATCACTTGATCCTGCCAGT | 53 | 145009 | 145028 | 60 |
| 533005 | 226 | 245 | exon 2 | GCATCACTTGATCCTGCCAG | 80 | 145010 | 145029 | 61 |
| 533006 | 228 | 247 | exon 2 | AAGCATCACTTGATCCTGCC | 75 | 145012 | 145031 | 62 |
| 533007 | 229 | 248 | exon 2 | AAAGCATCACTTGATCCTGC | 61 | 145013 | 145032 | 63 |
| 533019 | 867 | 886 | exon 7 | ATCTCACACGCACTTCATAT | 35 | 290365 | 290384 | 64 |
| 533020 | 868 | 887 | exon 7 | GATCTCACACGCACTTCATA | 47 | 290366 | 290385 | 65 |
| 533021 | 870 | 889 | exon 7 | TGGATCTCACACGCACTTCA | 86 | 290368 | 290387 | 66 |
| 533022 | 871 | 890 | exon 7 | TTGGATCTCACACGCACTTC | 70 | 290369 | 290388 | 67 |
| 533037 | 1360 | 1379 | exon 10 | TCCAGAATGTCAGGTTCACA | 59 | 297777 | 297796 | 68 |
| 533038 | 1361 | 1380 | exon 10 | CTCCAGAATGTCAGGTTCAC | 74 | 297778 | 297797 | 69 |
| 533039 | 1363 | 1382 | exon 10 | GTCTCCAGAATGTCAGGTTC | 45 | 297780 | 297799 | 70 |
| 533040 | 1364 | 1383 | exon 10 | AGTCTCCAGAATGTCAGGTT | 51 | 297781 | 297800 | 71 |
| 533042 | 1525 | 1544 | exon 10 | GCTTGGATAACACTGGGCTG | 41 | 297942 | 297961 | 72 |
| 533043 | 1526 | 1545 | exon 10 | TGCTTGGATAACACTGGGCT | 46 | 297943 | 297962 | 73 |
| 533044 | 1528 | 1547 | exon 10 | TCTGCTTGGATAACACTGGG | 55 | 297945 | 297964 | 74 |
| 533045 | 1529 | 1548 | exon 10 | CTCTGCTTGGATAACACTGG | 47 | 297946 | 297965 | 75 |
| 533046 | 1530 | 1549 | exon 10 | TCTCTGCTTGGATAACACTG | 54 | 297947 | 297966 | 76 |
| 533047 | 1744 | 1763 | exon 10 | CAGAGTGAGACCATTTCCGG | 47 | 298161 | 298180 | 77 |
| 533048 | 1745 | 1764 | exon 10 | GCAGAGTGAGACCATTTCCG | 60 | 298162 | 298181 | 78 |
| 533049 | 1747 | 1766 | exon 10 | TGGCAGAGTGAGACCATTTC | 65 | 298164 | 298183 | 79 |
| 533050 | 1748 | 1767 | exon 10 | TTGGCAGAGTGAGACCATTT | 47 | 298165 | 298184 | 80 |
| 533051 | 1749 | 1768 | exon 10 | CTTGGCAGAGTGAGACCATT | 30 | 298166 | 298185 | 81 |
| 533066 | 2685 | 2704 | exon 10 | CAGTGTGTAGTGTAATATAA | 53 | 299102 | 299121 | 82 |
| 533067 | 2686 | 2705 | exon 10 | ACAGTGTGTAGTGTAATATA | 68 | 299103 | 299122 | 83 |
| 533068 | 2688 | 2707 | exon 10 | ACACAGTGTGTAGTGTAATA | 62 | 299105 | 299124 | 84 |
| 533069 | 2689 | 2708 | exon 10 | TACACAGTGTGTAGTGTAAT | 55 | 299106 | 299125 | 85 |
| 533070 | 2690 | 2709 | exon 10 | GTACACAGTGTGTAGTGTAA | 50 | 299107 | 299126 | 86 |
| 533071 | 3205 | 3224 | exon 10 | TGTACCTTATTCCCTTCCTG | 68 | 299622 | 299641 | 87 |
| 533072 | 3206 | 3225 | exon 10 | TTGTACCTTATTCCCTTCCT | 61 | 299623 | 299642 | 88 |
| 533073 | 3208 | 3227 | exon 10 | TCTTGTACCTTATTCCCTTC | 60 | 299625 | 299644 | 89 |
| 533074 | 3209 | 3228 | exon 10 | TTCTTGTACCTTATTCCCTT | 46 | 299626 | 299645 | 90 |

TABLE 124
Inhibition of GHR mRNA by 5-10-5 MOE gapmers targeting intronic and
exonic regions of SEQ ID NO: 1 and 2

| | SEQ | SEQ | | | | SEQ | SEQ | |
|---|---|---|---|---|---|---|---|---|
| | ID | ID | | | | ID | ID | |
| | NO: 1 | NO: 1 | | | | NO: 2 | NO: 2 | |
| ISIS | Start | Stop | Target | | % | Start | Stop | SEQ |
| NO | Site | Site | Region | Sequence | inhibition | Site | Site | ID NO |
| 532174 | n/a | n/a | Intron 1 | ACATGTACCCAAACCAACAC | 37 | 18731 | 18750 | 91 |
| 533086 | 3210 | 3229 | Exon 10 | CTTCTTGTACCTTATTCCCT | 72 | 299627 | 299646 | 92 |
| 533087 | 3212 | 3231 | Exon 10 | TGCTTCTTGTACCTTATTCC | 77 | 299629 | 299648 | 93 |
| 533088 | 3213 | 3232 | Exon 10 | ATGCTTCTTGTACCTTATTC | 63 | 299630 | 299649 | 94 |
| 533089 | 3215 | 3234 | Exon 10 | AAATGCTTCTTGTACCTTAT | 67 | 299632 | 299651 | 95 |
| 533090 | 3216 | 3235 | Exon 10 | AAAATGCTTCTTGTACCTTA | 50 | 299633 | 299652 | 96 |
| 533091 | 3217 | 3236 | Exon 10 | CAAAATGCTTCTTGTACCTT | 44 | 299634 | 299653 | 97 |
| 533092 | 3518 | 3537 | Exon 10 | CTTCTGAATGCTTGCTTTGA | 29 | 299935 | 299954 | 98 |
| 533093 | 3519 | 3538 | Exon 10 | TCTTCTGAATGCTTGCTTTG | 47 | 299936 | 299955 | 99 |
| 533094 | 3521 | 3540 | Exon 10 | TTTCTTCTGAATGCTTGCTT | 63 | 299938 | 299957 | 100 |
| 533095 | 3522 | 3541 | Exon 10 | TTTTCTTCTGAATGCTTGCT | 51 | 299939 | 299958 | 101 |
| 533096 | 3523 | 3542 | Exon 10 | TTTTTCTTCTGAATGCTTGC | 34 | 299940 | 299959 | 102 |
| 533097 | 4041 | 4060 | Exon 10 | TGCGATAAATGGGAAATACT | 36 | 300458 | 300477 | 103 |
| 533098 | 4042 | 4061 | Exon 10 | CTGCGATAAATGGGAAATAC | 52 | 300459 | 300478 | 104 |
| 533099 | 4043 | 4062 | Exon 10 | TCTGCGATAAATGGGAAATA | 41 | 300460 | 300479 | 105 |
| 533100 | 4045 | 4064 | Exon 10 | GGTCTGCGATAAATGGGAAA | 40 | 300462 | 300481 | 106 |
| 533101 | 4046 | 4065 | Exon 10 | AGGTCTGCGATAAATGGGAA | 39 | 300463 | 300482 | 107 |
| 533102 | 4048 | 4067 | Exon 10 | AAAGGTCTGCGATAAATGGG | 34 | 300465 | 300484 | 108 |
| 533103 | 4049 | 4068 | Exon 10 | AAAAGGTCTGCGATAAATGG | 35 | 300466 | 300485 | 109 |
| 533104 | 4050 | 4069 | Exon 10 | AAAAAGGTCTGCGATAAATG | 15 | 300467 | 300486 | 110 |
| 533115 | n/a | n/a | Intron 1 | CATGAAGGCCACTCTTCCAA | 63 | 12777 | 12796 | 111 |
| 533116 | n/a | n/a | Intron 1 | CCATGAAGGCCACTCTTCCA | 78 | 12778 | 12797 | 112 |
| 533117 | n/a | n/a | Intron 1 | CCCATGAAGGCCACTCTTCC | 71 | 12779 | 12798 | 113 |
| 533118 | n/a | n/a | Intron 1 | TGCCCATGAAGGCCACTCTT | 66 | 12781 | 12800 | 114 |
| 533119 | n/a | n/a | Intron 1 | TTGCCCATGAAGGCCACTCT | 60 | 12782 | 12801 | 115 |
| 533120 | n/a | n/a | Intron 1 | GTTGCCCATGAAGGCCACTC | 74 | 12783 | 12802 | 116 |
| 533121 | n/a | n/a | Intron 1 | GGTCTTTCATGAATCAAGCT | 79 | 17927 | 17946 | 117 |
| 533122 | n/a | n/a | Intron 1 | TGGTCTTTCATGAATCAAGC | 83 | 17928 | 17947 | 118 |
| 533123 | n/a | n/a | Intron 1 | ATGGTCTTTCATGAATCAAG | 83 | 17929 | 17948 | 119 |
| 533124 | n/a | n/a | Intron 1 | TGATGGTCTTTCATGAATCA | 78 | 17931 | 17950 | 120 |
| 533125 | n/a | n/a | Intron 1 | CTGATGGTCTTTCATGAATC | 82 | 17932 | 17951 | 121 |
| 533126 | n/a | n/a | Intron 1 | GCTGATGGTCTTTCATGAAT | 74 | 17933 | 17952 | 122 |
| 533127 | n/a | n/a | Intron 1 | GTACCCAAACCAACACTAAT | 57 | 18727 | 18746 | 123 |
| 533128 | n/a | n/a | Intron 1 | TGTACCCAAACCAACACTAA | 65 | 18728 | 18747 | 124 |
| 533129 | n/a | n/a | Intron 1 | ATGTACCCAAACCAACACTA | 64 | 18729 | 18748 | 125 |
| 533130 | n/a | n/a | Intron 1 | GACATGTACCCAAACCAACA | 63 | 18732 | 18751 | 126 |
| 533131 | n/a | n/a | Intron 1 | AGACATGTACCCAAACCAAC | 81 | 18733 | 18752 | 127 |
| 533132 | n/a | n/a | Intron 1 | AGGAATGGAAAACCAAATAT | 49 | 26494 | 26513 | 128 |
| 533133 | n/a | n/a | Intron 1 | CAGGAATGGAAAACCAAATA | 74 | 26495 | 26514 | 129 |
| | | | | | | 121986 | 122005 | |
| 533134 | n/a | n/a | Intron 1 | TCAGGAATGGAAAACCAAAT | 73 | 26496 | 26515 | 130 |
| | | | | | | 121987 | 122006 | |
| 533135 | n/a | n/a | Intron 1 | ACTCAGGAATGGAAAACCAA | 77 | 26498 | 26517 | 131 |
| | | | | | | 113032 | 113051 | |
| | | | | | | 121989 | 122008 | |
| 533136 | n/a | n/a | Intron 1 | AACTCAGGAATGGAAAACCA | 79 | 26499 | 26518 | 132 |
| | | | | | | 113033 | 113052 | |
| | | | | | | 121990 | 122009 | |
| 533137 | n/a | n/a | Intron 1 | TAACTCAGGAATGGAAAACC | 67 | 26500 | 26519 | 133 |
| | | | | | | 113034 | 113053 | |
| | | | | | | 121991 | 122010 | |
| 533138 | n/a | n/a | Intron 1 | CAAAATTACTGCAGTCACAG | 67 | 39716 | 39735 | 134 |
| 533139 | n/a | n/a | Intron 1 | ACAAAATTACTGCAGTCACA | 81 | 39717 | 39736 | 135 |
| 533140 | n/a | n/a | Intron 1 | TACAAAATTACTGCAGTCAC | 81 | 39718 | 39737 | 136 |
| 533141 | n/a | n/a | Intron 1 | CATACAAAATTACTGCAGTC | 67 | 39720 | 39739 | 137 |
| 533142 | n/a | n/a | Intron 1 | ACATACAAAATTACTGCAGT | 48 | 39721 | 39740 | 138 |
| 533143 | n/a | n/a | Intron 1 | AACATACAAAATTACTGCAG | 53 | 39722 | 39741 | 139 |
| 533144 | n/a | n/a | Intron 1 | TTTTAGTATGAACCTTAAAA | 0 | 42139 | 42158 | 140 |
| 533145 | n/a | n/a | Intron 1 | CTTTTAGTATGAACCTTAAA | 38 | 42140 | 42159 | 141 |
| 533146 | n/a | n/a | Intron 1 | TCTTTTAGTATGAACCTTAA | 57 | 42141 | 42160 | 142 |
| 533147 | n/a | n/a | Intron 1 | AATCTTTTAGTATGAACCTT | 60 | 42143 | 42162 | 143 |
| 533148 | n/a | n/a | Intron 1 | CAATCTTTTAGTATGAACCT | 70 | 42144 | 42163 | 144 |
| 533149 | n/a | n/a | Intron 1 | ACAATCTTTTAGTATGAACC | 60 | 42145 | 42164 | 145 |
| 533150 | n/a | n/a | Intron 1 | AAGTTATGTGACTCTGAGCA | 67 | 43174 | 43193 | 146 |
| 533151 | n/a | n/a | Intron 1 | CAAGTTATGTGACTCTGAGC | 67 | 43175 | 43194 | 147 |
| 533152 | n/a | n/a | Intron 1 | TCAAGTTATGTGACTCTGAG | 63 | 43176 | 43195 | 148 |
| 533153 | n/a | n/a | Intron 1 | AGTTCTCCATTAGGGTTCTG | 83 | 50948 | 50967 | 149 |
| 533154 | n/a | n/a | Intron 1 | TAGTTCTCCATTAGGGTTCT | 76 | 50949 | 50968 | 150 |
| 533155 | n/a | n/a | Intron 1 | ATAGTTCTCCATTAGGGTTC | 51 | 50950 | 50969 | 151 |
| 533156 | n/a | n/a | Intron 1 | AAGCAGGTTGGCAGACAGAC | 79 | 53467 | 53486 | 152 |
| 533157 | n/a | n/a | Intron 1 | GAAGCAGGTTGGCAGACAGA | 60 | 53468 | 53487 | 153 |
| 533158 | n/a | n/a | Intron 1 | GGAAGCAGGTTGGCAGACAG | 67 | 53469 | 53488 | 154 |
| 533159 | n/a | n/a | Intron 1 | TCTTCTTGTGAGCTGGCTTC | 61 | 64882 | 64901 | 155 |
| 533160 | n/a | n/a | Intron 1 | GTCTTCTTGTGAGCTGGCTT | 83 | 64883 | 64902 | 156 |
| 533161 | n/a | n/a | Intron 1 | AGTCTTCTTGTGAGCTGGCT | 81 | 64884 | 64903 | 157 |

TABLE 125
Inhibition of GHR mRNA by 5-10-5 MOE gapmers targeting intronic and
exonic regions of SEQ ID NO: 1 and 2

| | SEQ | SEQ | | | | | SEQ | |
|---|---|---|---|---|---|---|---|---|
| | ID | ID | | | | | ID | |
| | NO: 1 | NO: 1 | | | | SEQ ID | NO: 2 | SEQ |
| ISIS | Start | Stop | Target | | % | NO: 2 | Stop | ID |
| NO | Site | Site | Region | Sequence | inhibition | Start Site | Site | NO |
| 533133 | n/a | n/a | Intron 1 | CAGGAATGGAAAACCAAATA | 76 | 26495 | 26514 | 129 |
| | | | | | | 121986 | 122005 | |
| 533134 | n/a | n/a | Intron 1 | TCAGGAATGGAAAACCAAAT | 83 | 26496 | 26515 | 130 |
| | | | | | | 121987 | 122006 | |
| 533174 | n/a | n/a | Intron 1 | TAAGTCTTCTTGTGAGCTGG | 73 | 64886 | 64905 | 158 |
| 533175 | n/a | n/a | Intron 1 | TTAAGTCTTCTTGTGAGCTG | 58 | 64887 | 64906 | 159 |
| 533176 | n/a | n/a | Intron 1 | ATTAAGTCTTCTTGTGAGCT | 51 | 64888 | 64907 | 160 |
| 533177 | n/a | n/a | Intron 1 | TCTCTTCCACTCACATCCAT | 72 | 65989 | 66008 | 161 |
| 533178 | n/a | n/a | Intron 1 | GTCTCTTCCACTCACATCCA | 86 | 65990 | 66009 | 162 |
| 533179 | n/a | n/a | Intron 1 | AGTCTCTTCCACTCACATCC | 80 | 65991 | 66010 | 163 |
| 533180 | n/a | n/a | Intron 1 | TAAGTATTTGTAGCAGTTGC | 31 | 78195 | 78214 | 164 |
| 533181 | n/a | n/a | Intron 1 | CTAAGTATTTGTAGCAGTTG | 14 | 78196 | 78215 | 165 |
| 533182 | n/a | n/a | Intron 1 | GCTAAGTATTTGTAGCAGTT | 59 | 78197 | 78216 | 166 |
| 533183 | n/a | n/a | Intron 1 | TGGCTAAGTATTTGTAGCAG | 34 | 78199 | 78218 | 167 |
| 533184 | n/a | n/a | Intron 1 | TTGGCTAAGTATTTGTAGCA | 18 | 78200 | 78219 | 168 |
| 533185 | n/a | n/a | Intron 1 | TTTGGCTAAGTATTTGTAGC | 21 | 78201 | 78220 | 169 |
| 533186 | n/a | n/a | Intron 1 | AAAATGTCAACAGTGCATAG | 61 | 80636 | 80655 | 170 |
| 533187 | n/a | n/a | Intron 1 | CAAAATGTCAACAGTGCATA | 78 | 80637 | 80656 | 171 |
| 533188 | n/a | n/a | Intron 1 | CCAAAATGTCAACAGTGCAT | 85 | 80638 | 80657 | 172 |
| 533189 | n/a | n/a | Intron 1 | GCCCAAAATGTCAACAGTGC | 82 | 80640 | 80659 | 173 |
| 533190 | n/a | n/a | Intron 1 | GGCCCAAAATGTCAACAGTG | 60 | 80641 | 80660 | 174 |
| 533191 | n/a | n/a | Intron 1 | TGGCCCAAAATGTCAACAGT | 31 | 80642 | 80661 | 175 |
| 533192 | n/a | n/a | Intron 1 | CAGAATCTTCTCTTTGGCCA | 66 | 98624 | 98643 | 176 |
| 533193 | n/a | n/a | Intron 1 | GCAGAATCTTCTCTTTGGCC | 81 | 98625 | 98644 | 177 |
| 533194 | n/a | n/a | Intron 1 | TGCAGAATCTTCTCTTTGGC | 72 | 98626 | 98645 | 178 |
| 533195 | n/a | n/a | Intron 1 | TTTGCAGAATCTTCTCTTTG | 33 | 98628 | 98647 | 179 |
| 533196 | n/a | n/a | Intron 1 | ATTTGCAGAATCTTCTCTTT | 27 | 98629 | 98648 | 180 |
| 533197 | n/a | n/a | Intron 1 | AATTTGCAGAATCTTCTCTT | 38 | 98630 | 98649 | 181 |
| 533198 | n/a | n/a | Intron 1 | ATAAAGCTATGCCATAAAGC | 37 | 99478 | 99497 | 182 |
| 533199 | n/a | n/a | Intron 1 | CATAAAGCTATGCCATAAAG | 14 | 99479 | 99498 | 183 |
| 533200 | n/a | n/a | Intron 1 | CCATAAAGCTATGCCATAAA | 30 | 99480 | 99499 | 184 |
| 533201 | n/a | n/a | Intron 1 | GACCATAAAGCTATGCCATA | 54 | 99482 | 99501 | 185 |
| 533202 | n/a | n/a | Intron 1 | TGACCATAAAGCTATGCCAT | 64 | 99483 | 99502 | 186 |
| 533203 | n/a | n/a | Intron 1 | CTGACCATAAAGCTATGCCA | 61 | 99484 | 99503 | 187 |
| 533204 | n/a | n/a | Intron 1 | CAAAAAGTTGAGCTGAGAAA | 0 | 101078 | 101097 | 188 |
| 533205 | n/a | n/a | Intron 1 | CCAAAAAGTTGAGCTGAGAA | 28 | 101079 | 101098 | 189 |
| 533206 | n/a | n/a | Intron 1 | CCCAAAAAGTTGAGCTGAGA | 52 | 101080 | 101099 | 190 |
| 533207 | n/a | n/a | Intron 1 | CACCCAAAAAGTTGAGCTGA | 60 | 101082 | 101101 | 191 |
| 533208 | n/a | n/a | Intron 1 | ACACCCAAAAAGTTGAGCTG | 34 | 101083 | 101102 | 192 |
| 533209 | n/a | n/a | Intron 1 | TACACCCAAAAAGTTGAGCT | 36 | 101084 | 101103 | 193 |
| 533210 | n/a | n/a | Intron 1 | CTTTTAATGGCACCCAAGCA | 41 | 103566 | 103585 | 194 |
| 533211 | n/a | n/a | Intron 1 | GCTTTTAATGGCACCCAAGC | 54 | 103567 | 103586 | 195 |
| 533212 | n/a | n/a | Intron 1 | TGCTTTTAATGGCACCCAAG | 67 | 103568 | 103587 | 196 |
| 533213 | n/a | n/a | Intron 1 | AATGCTTTTAATGGCACCCA | 73 | 103570 | 103589 | 197 |
| 533214 | n/a | n/a | Intron 1 | AAATGCTTTTAATGGCACCC | 73 | 103571 | 103590 | 198 |
| 533215 | n/a | n/a | Intron 1 | GAAATGCTTTTAATGGCACC | 41 | 103572 | 103591 | 199 |
| 533216 | n/a | n/a | Intron 1 | TAATTCTTAAGGGCCCTCTG | 36 | 106963 | 106982 | 200 |
| 533217 | n/a | n/a | Intron 1 | ATAATTCTTAAGGGCCCTCT | 45 | 106964 | 106983 | 201 |
| 533218 | n/a | n/a | Intron 1 | CATAATTCTTAAGGGCCCTC | 50 | 106965 | 106984 | 202 |
| 533219 | n/a | n/a | Intron 1 | AGCATAATTCTTAAGGGCCC | 48 | 106967 | 106986 | 203 |
| 533220 | n/a | n/a | Intron 1 | TAGCATAATTCTTAAGGGCC | 52 | 106968 | 106987 | 204 |
| 533221 | n/a | n/a | Intron 1 | TTAGCATAATTCTTAAGGGC | 28 | 106969 | 106988 | 205 |
| 533222 | n/a | n/a | Intron 1 | AGGAATGGAAAACCAAACAT | 13 | 113028 | 113047 | 206 |
| 533223 | n/a | n/a | Intron 1 | CAGGAATGGAAAACCAAACA | 64 | 113029 | 113048 | 207 |
| 533224 | n/a | n/a | Intron 1 | TCAGGAATGGAAAACCAAAC | 61 | 113030 | 113049 | 208 |
| 533225 | n/a | n/a | Intron 1 | AGGAATGGAAAACCAAATAC | 18 | 121985 | 122004 | 209 |
| 533226 | n/a | n/a | Intron 1 | CATGACTATGTTCTGGCAAG | 37 | 125591 | 125610 | 210 |
| 533227 | n/a | n/a | Intron 1 | ACATGACTATGTTCTGGCAA | 44 | 125592 | 125611 | 211 |
| 533228 | n/a | n/a | Intron 1 | CACATGACTATGTTCTGGCA | 63 | 125593 | 125612 | 212 |
| 533229 | n/a | n/a | Intron 1 | GTCACATGACTATGTTCTGG | 47 | 125595 | 125614 | 213 |
| 533230 | n/a | n/a | Intron 1 | GGTCACATGACTATGTTCTG | 49 | 125596 | 125615 | 214 |
| 533231 | n/a | n/a | Intron 1 | TGGTCACATGACTATGTTCT | 30 | 125597 | 125616 | 215 |
| 533232 | n/a | n/a | Intron 2 | CTGAATTCTGAGCTCTGGAA | 73 | 145428 | 145447 | 216 |
| 533233 | n/a | n/a | Intron 2 | CCTGAATTCTGAGCTCTGGA | 88 | 145429 | 145448 | 217 |
| 533234 | n/a | n/a | Intron 2 | GCCTGAATTCTGAGCTCTGG | 92 | 145430 | 145449 | 218 |
| 533235 | n/a | n/a | Intron 2 | AAGCCTGAATTCTGAGCTCT | 83 | 145432 | 145451 | 219 |
| 533236 | n/a | n/a | Intron 2 | CAAGCCTGAATTCTGAGCTC | 68 | 145433 | 145452 | 220 |
| 533237 | n/a | n/a | Intron 2 | ACAAGCCTGAATTCTGAGCT | 81 | 145434 | 145453 | 221 |
| 533238 | n/a | n/a | Intron 2 | GGATCTCAGCTGCAATTCTT | 72 | 146235 | 146254 | 222 |
| 533239 | n/a | n/a | Intron 2 | AGGATCTCAGCTGCAATTCT | 53 | 146236 | 146255 | 223 |
| 533240 | n/a | n/a | Intron 2 | GAGGATCTCAGCTGCAATTC | 69 | 146237 | 146256 | 224 |
| 533241 | n/a | n/a | Intron 2 | CAGAGGATCTCAGCTGCAAT | 69 | 146239 | 146258 | 225 |
| 533242 | n/a | n/a | Intron 2 | GCAGAGGATCTCAGCTGCAA | 76 | 146240 | 146259 | 226 |
| 533243 | 230 | 249 | Exon 2 | AAAAGCATCACTTGATCCTG | 23 | 145014 | 145033 | 227 |

TABLE 126
Inhibition of GHR mRNA by 3-10-4 MOE gapmers targeting intronic
and exonic regions of SEQ ID NO: 1 and 2

| | SEQ ID | SEQ ID | | | | SEQ | SEQ ID | |
|---|---|---|---|---|---|---|---|---|
| | NO: 1 | NO: 1 | | | | ID NO: | NO: 2 | |
| ISIS | Start | Stop | Target | | % | 2 Start | Stop | SEQ |
| NO | Site | Site | Region | Sequence | inhibition | Site | Site | ID NO |
| 539284 | 206 | 222 | Exon 2 | CAAGGTCAACAGCAGCT | 62 | 144990 | 145006 | 228 |
| 539285 | 207 | 223 | Exon 2 | CCAAGGTCAACAGCAGC | 74 | 144991 | 145007 | 229 |
| 539286 | 208 | 224 | Exon 2 | GCCAAGGTCAACAGCAG | 73 | 144992 | 145008 | 230 |
| 539290 | 869 | 885 | Exon 7 | TCTCACACGCACTTCAT | 29 | 290367 | 290383 | 231 |
| 539291 | 870 | 886 | Exon 7 | ATCTCACACGCACTTCA | 51 | 290368 | 290384 | 232 |
| 539292 | 871 | 887 | Exon 7 | GATCTCACACGCACTTC | 56 | 290369 | 290385 | 233 |
| 539299 | n/a | n/a | Intron 1 | CTTTCATGAATCAAGCT | 63 | 17927 | 17943 | 234 |
| 539300 | n/a | n/a | Intron 1 | TCTTTCATGAATCAAGC | 49 | 17928 | 17944 | 235 |
| 539301 | n/a | n/a | Intron 1 | GTCTTTCATGAATCAAG | 61 | 17929 | 17945 | 236 |
| 539302 | n/a | n/a | Intron 1 | GGTCTTTCATGAATCAA | 93 | 17930 | 17946 | 237 |
| 539303 | n/a | n/a | Intron 1 | ATGGTCTTTCATGAATC | 74 | 17932 | 17948 | 238 |
| 539304 | n/a | n/a | Intron 1 | GATGGTCTTTCATGAAT | 56 | 17933 | 17949 | 239 |
| 539305 | n/a | n/a | Intron 1 | TATATCAATATTCTCCC | 42 | 21820 | 21836 | 240 |
| 539306 | n/a | n/a | Intron 1 | TTATATCAATATTCTCC | 33 | 21821 | 21837 | 241 |
| 539307 | n/a | n/a | Intron 1 | GTTATATCAATATTCTC | 12 | 21822 | 21838 | 242 |
| 539308 | n/a | n/a | Intron 1 | TTTCTTTAGCAATAGTT | 21 | 22518 | 22534 | 243 |
| 539309 | n/a | n/a | Intron 1 | CTTTCTTTAGCAATAGT | 38 | 22519 | 22535 | 244 |
| 539310 | n/a | n/a | Intron 1 | GCTTTCTTTAGCAATAG | 39 | 22520 | 22536 | 245 |
| 539311 | n/a | n/a | Intron 1 | AGGAATGGAAAACCAAA | 18 | 26497 | 26513 | 246 |
| | | | | | | 113031 | 113047 | |
| | | | | | | 121988 | 122004 | |
| 539312 | n/a | n/a | Intron 1 | CAGGAATGGAAAACCAA | 40 | 26498 | 26514 | 247 |
| | | | | | | 113032 | 113048 | |
| | | | | | | 121989 | 122005 | |
| 539313 | n/a | n/a | Intron 1 | TCAGGAATGGAAAACCA | 49 | 26499 | 26515 | 248 |
| | | | | | | 113033 | 113049 | |
| | | | | | | 121990 | 122006 | |
| 539314 | n/a | n/a | Intron 1 | TCTCCATTAGGGTTCTG | 87 | 50948 | 50964 | 249 |
| 539315 | n/a | n/a | Intron 1 | TTCTCCATTAGGGTTCT | 57 | 50949 | 50965 | 250 |
| 539316 | n/a | n/a | Intron 1 | GTTCTCCATTAGGGTTC | 73 | 50950 | 50966 | 251 |
| 539317 | n/a | n/a | Intron 1 | AGGTTGGCAGACAGACA | 73 | 53466 | 53482 | 252 |
| 539318 | n/a | n/a | Intron 1 | CAGGTTGGCAGACAGAC | 84 | 53467 | 53483 | 253 |
| 539319 | n/a | n/a | Intron 1 | GCAGGTTGGCAGACAGA | 85 | 53468 | 53484 | 254 |
| 539320 | n/a | n/a | Intron 1 | CTTCTTGTGAGCTGGCT | 87 | 64884 | 64900 | 255 |
| 539321 | n/a | n/a | Intron 1 | TCTTCTTGTGAGCTGGC | 89 | 64885 | 64901 | 256 |
| 539322 | n/a | n/a | Intron 1 | GTCTTCTTGTGAGCTGG | 87 | 64886 | 64902 | 257 |
| 539323 | n/a | n/a | Intron 1 | AGTCTTCTTGTGAGCTG | 70 | 64887 | 64903 | 258 |
| 539324 | n/a | n/a | Intron 1 | TCTTCCACTCACATCCA | 65 | 65990 | 66006 | 259 |
| 539325 | n/a | n/a | Intron 1 | CTCTTCCACTCACATCC | 78 | 65991 | 66007 | 260 |
| 539326 | n/a | n/a | Intron 1 | TCTCTTCCACTCACATC | 68 | 65992 | 66008 | 261 |
| 539327 | n/a | n/a | Intron 1 | GTCTCTTCCACTCACAT | 74 | 65993 | 66009 | 262 |
| 539328 | n/a | n/a | Intron 1 | ATAGATTTTGACTTCCC | 57 | 72107 | 72123 | 263 |
| 539329 | n/a | n/a | Intron 1 | CATAGATTTTGACTTCC | 35 | 72108 | 72124 | 264 |
| 539330 | n/a | n/a | Intron 1 | GCATAGATTTTGACTTC | 53 | 72109 | 72125 | 265 |
| 539331 | n/a | n/a | Intron 1 | AAAATGTCAACAGTGCA | 86 | 80639 | 80655 | 266 |
| 539332 | n/a | n/a | Intron 1 | CAAAATGTCAACAGTGC | 73 | 80640 | 80656 | 267 |
| 539333 | n/a | n/a | Intron 1 | CCAAAATGTCAACAGTG | 34 | 80641 | 80657 | 268 |
| 539334 | n/a | n/a | Intron 1 | CCCAAAATGTCAACAGT | 66 | 80642 | 80658 | 269 |
| 539335 | n/a | n/a | Intron 1 | CATGACTATGTTCTGGC | 67 | 125594 | 125610 | 270 |
| 539336 | n/a | n/a | Intron 1 | ACATGACTATGTTCTGG | 42 | 125595 | 125611 | 271 |
| 539337 | n/a | n/a | Intron 1 | CACATGACTATGTTCTG | 29 | 125596 | 125612 | 272 |
| 539338 | n/a | n/a | Intron 2 | GAATTCTGAGCTCTGGA | 77 | 145429 | 145445 | 273 |
| 539339 | n/a | n/a | Intron 2 | TGAATTCTGAGCTCTGG | 84 | 145430 | 145446 | 274 |
| 539340 | n/a | n/a | Intron 2 | CTGAATTCTGAGCTCTG | 80 | 145431 | 145447 | 275 |
| 539341 | n/a | n/a | Intron 2 | CCTGAATTCTGAGCTCT | 84 | 145432 | 145448 | 276 |
| 539342 | n/a | n/a | Intron 2 | GCCTGAATTCTGAGCTC | 84 | 145433 | 145449 | 277 |
| 539343 | n/a | n/a | Intron 2 | AGCCTGAATTCTGAGCT | 80 | 145434 | 145450 | 278 |
| 539344 | n/a | n/a | Intron 2 | ATATTGTAATTCTTGGT | 0 | 148059 | 148075 | 279 |
| 539345 | n/a | n/a | Intron 2 | GATATTGTAATTCTTGG | 20 | 148060 | 148076 | 280 |
| 539346 | n/a | n/a | Intron 2 | TGATATTGTAATTCTTG | 13 | 148061 | 148077 | 281 |
| 539347 | n/a | n/a | Intron 2 | CTGATATTGTAATTCTT | 8 | 148062 | 148078 | 282 |
| 539348 | n/a | n/a | Intron 2 | CCTGATATTGTAATTCT | 67 | 148063 | 148079 | 283 |
| 539349 | n/a | n/a | Intron 2 | GCCTGATATTGTAATTC | 73 | 148064 | 148080 | 284 |
| 539350 | n/a | n/a | Intron 2 | TGCCTGATATTGTAATT | 32 | 148065 | 148081 | 285 |
| 539351 | n/a | n/a | Intron 2 | AATTATGTGCTTTGCCT | 58 | 148907 | 148923 | 286 |
| 539352 | n/a | n/a | Intron 2 | CAATTATGTGCTTTGCC | 82 | 148908 | 148924 | 287 |
| 539353 | n/a | n/a | Intron 2 | TCAATTATGTGCTTTGC | 68 | 148909 | 148925 | 288 |
| 539354 | n/a | n/a | Intron 2 | GTCAATTATGTGCTTTG | 80 | 148910 | 148926 | 289 |
| 539355 | n/a | n/a | Intron 2 | GCCATCACCAAACACCA | 94 | 150972 | 150988 | 290 |
| 539356 | n/a | n/a | Intron 2 | TGCCATCACCAAACACC | 84 | 150973 | 150989 | 291 |
| 539357 | n/a | n/a | Intron 2 | TTGCCATCACCAAACAC | 74 | 150974 | 150990 | 292 |
| 539358 | n/a | n/a | Intron 2 | TGGTGACTCTGCCTGAT | 85 | 151387 | 151403 | 293 |
| 539359 | n/a | n/a | Intron 2 | CTGGTGACTCTGCCTGA | 86 | 151388 | 151404 | 294 |

TABLE 127
Inhibition of GHR mRNA by 5-10-5 MOE
gapmers targeting intron 1 of SEQ ID NO: 2

| | | | SEQ ID | SEQ ID | |
|---|---|---|---|---|---|
| | | | NO: 2 | NO: 2 | |
| | | % | Start | Stop | SEQ ID |
| ISIS NO | Sequence | inhibition | Site | Site | NO |
| 523561 | TATTTCAGAAAGACTTTCTG | 11 | 10373 | 10392 | 295 |
| 523562 | AGGAAAAAATCAAGGAGTTA | 8 | 11173 | 11192 | 296 |
| 523563 | TATTTACTGAACACCTATTC | 12 | 11973 | 11992 | 297 |
| 523564 | GCCCATGAAGGCCACTCTTC | 70 | 12780 | 12799 | 298 |
| 523565 | ACCTATAAATAAAGTGAGGA | 0 | 13581 | 13600 | 299 |
| 523566 | GTTTCATAACCTGCTAATAA | 40 | 14451 | 14470 | 300 |
| 523567 | ATGTGCCTTACAGTTATCAG | 36 | 15251 | 15270 | 301 |
| 523568 | TTCTGAATTTAGAATTATAG | 0 | 16051 | 16070 | 302 |
| 523569 | GTTTATAATCTAGCAGTTAC | 26 | 17130 | 17149 | 303 |
| 523570 | GATGGTCTTTCATGAATCAA | 62 | 17930 | 17949 | 304 |
| 523571 | CATGTACCCAAACCAACACT | 65 | 18730 | 18749 | 305 |
| 523572 | TAAAATACAGCCTACATCAT | 0 | 19637 | 19656 | 306 |
| 523573 | CCATCACTACAACAAACTCA | 39 | 20451 | 20470 | 307 |
| 523574 | ATCTGAAATGATCCCCTTTC | 33 | 21283 | 21302 | 308 |
| 523575 | TGTTGCCCCTCCAAAAAGAC | 12 | 22144 | 22163 | 309 |
| 523576 | ATTAAAATTTTAAATGATGT | 0 | 22944 | 22963 | 310 |
| 523577 | CTCAGGAATGGAAAACCAAA | 71 | 26497 | 26516 | 311 |
| | | | 113031 | 113050 | |
| | | | 121988 | 122007 | |
| 523578 | AAAATTCTAGAAGATAACAT | 0 | 27838 | 27857 | 312 |
| 523579 | CTAGAAGTCCTAGCCAGAGT | 2 | 28748 | 28767 | 313 |
| 523580 | AACCGATATCACAGAAATAC | 0 | 29548 | 29567 | 314 |
| 523581 | AAGATAGACAGTAACATAAT | 0 | 30348 | 30367 | 315 |
| 523582 | GCACTACAAGAACTGCTTAA | 40 | 31172 | 31191 | 316 |
| 523583 | TTTCCAGACAAAGAATTCAG | 6 | 31978 | 31997 | 317 |
| 523584 | GTAGACAGCCTTTCTGGAAC | 20 | 32827 | 32846 | 318 |
| 523585 | CATCCTACATAGTGGCTGTG | 47 | 33635 | 33654 | 319 |
| 523586 | CAGAACAGTGTGTGGAGACT | 8 | 34452 | 34471 | 320 |
| 523587 | AGCTTTAAAAATACCTCTGC | 52 | 35466 | 35485 | 321 |
| 523588 | CCCAGGTACTTGCTCTCAGA | 22 | 36266 | 36285 | 322 |
| 523589 | TTACACCTGATTCTAGAAAT | 30 | 37066 | 37085 | 323 |
| 523590 | CTTTTCTCTACAACCTCACA | 34 | 38094 | 38113 | 324 |
| 523591 | TAGTAGTTTGAATTTCAAAG | 1 | 38909 | 38928 | 325 |
| 523592 | ATACAAAATTACTGCAGTCA | 60 | 39719 | 39738 | 326 |
| 523593 | GCCACTGCCAAAAAGGAGGA | 30 | 40519 | 40538 | 327 |
| 523594 | TGACAGAAACAGAGCTATGA | 33 | 41342 | 41361 | 328 |
| 523595 | ATCTTTTAGTATGAACCTTA | 65 | 42142 | 42161 | 329 |
| 523596 | AGTTATGTGACTCTGAGCAC | 63 | 43173 | 43192 | 330 |
| 523597 | ACTATGCCCTAGTTACTTCT | 29 | 43973 | 43992 | 331 |
| 523598 | TATAGTGGAAGTGATAGATC | 0 | 44812 | 44831 | 332 |
| 523599 | TGTTTTCTGAAATGGAATGT | 0 | 45733 | 45752 | 333 |
| 523600 | GCTGTAAATGTAATGAGTGT | 34 | 46553 | 46572 | 334 |
| 523601 | GAGAGAAGCCATGGCCCTAG | 20 | 47392 | 47411 | 335 |
| 523602 | CTCTCTTTCCCAGAACAAGA | 32 | 48210 | 48229 | 336 |
| 523603 | TCCAAAATGTCCAGTATAAT | 33 | 50072 | 50091 | 337 |
| 523604 | GTTCTCCATTAGGGTTCTGG | 74 | 50947 | 50966 | 338 |
| 523605 | TTAGTCACCCATCCACCACT | 41 | 51747 | 51766 | 339 |
| 523606 | CATGAATTCACCGAGTTAGG | 51 | 52573 | 52592 | 340 |
| 523607 | AGCAGGTTGGCAGACAGACA | 62 | 53466 | 53485 | 341 |
| 523608 | GAAAGACTTAAATTTTCACA | 0 | 54306 | 54325 | 342 |
| 523609 | TAGTAGAGGAAAAGGAGAAT | 0 | 55730 | 55749 | 343 |
| 523610 | AAACAGGGTCTGGAGTGGAC | 3 | 61243 | 61262 | 344 |
| 523611 | CAAGCTGATAATTAAAAAGA | 0 | 62462 | 62481 | 345 |
| 523612 | ATAAAGATACATTTTCTGGG | 8 | 63277 | 63296 | 346 |
| 523613 | CAGGATTCTTCCTGCCTGGC | 47 | 64085 | 64104 | 347 |
| 523614 | AAGTCTTCTTGTGAGCTGGC | 71 | 64885 | 64904 | 348 |
| 523615 | CTCTTCCACTCACATCCATT | 63 | 65988 | 66007 | 349 |
| 523616 | CCTATATCAGAAGACAAATG | 5 | 66806 | 66825 | 350 |
| 523617 | TCAAAACCCTGCCAAGGTAC | 44 | 67662 | 67681 | 351 |
| 523618 | TCATATTCTACTTCTGTTTA | 11 | 68462 | 68481 | 352 |
| 523619 | CATTCCAGTGTTTCAGTAAG | 13 | 69262 | 69281 | 353 |
| 523620 | GGCCTGGAATTAATCCTCAG | 49 | 70114 | 70133 | 354 |
| 523621 | AATGCCCTCTCCCTGTGCCT | 48 | 70925 | 70944 | 355 |
| 523622 | TTTATAATCAACCTTTGCTA | 9 | 71741 | 71760 | 356 |
| 523623 | ATATAACTACTTAAAATAAT | 0 | 72541 | 72560 | 357 |
| 523624 | TTAGCCAGGATATGGTTGCC | 50 | 73350 | 73369 | 358 |
| 523625 | CTACCTCCATCAAAGAAAAT | 0 | 74190 | 74209 | 359 |
| 523626 | GCATGCATAGATAAGTTTGA | 20 | 74990 | 75009 | 360 |
| 523627 | ATGAGAGTAAATGGATTTTC | 10 | 75790 | 75809 | 361 |
| 523628 | TTGGCAATCCTTGCTTAAAA | 34 | 76598 | 76617 | 362 |
| 523629 | GAATTAAGCCAGACTTATTT | 3 | 77398 | 77417 | 363 |
| 523630 | GGCTAAGTATTTGTAGCAGT | 55 | 78198 | 78217 | 364 |
| 523631 | TTGCCTGTGTGCAACTGGCG | 0 | 79005 | 79024 | 365 |
| 523632 | GTGGCCTTAGTAGGCCAGCT | 0 | 79827 | 79846 | 366 |
| 523633 | CCCAAAATGTCAACAGTGCA | 70 | 80639 | 80658 | 367 |
| 523634 | TTAAGCCTTCAATTTGAAAA | 0 | 81455 | 81474 | 368 |
| 523635 | TGCTCAGAAGGTTGAGCATA | 0 | 82261 | 82280 | 369 |
| 523636 | TTAATGCTTTCCCAAAGCTC | 35 | 83061 | 83080 | 370 |
| 523637 | AAAAGACTTCATACCTTTAC | 52 | 83884 | 83903 | 371 |

TABLE 128
Inhibition of GHR mRNA by 5-10-5 MOE gapmers targeting
intron 1 of SEQ ID NO: 2

| | | | SEQ | SEQ | |
|---|---|---|---|---|---|
| | | | ID | ID | |
| | | | NO: 2 | NO: 2 | |
| ISIS | | | Start | Stop | SEQ ID |
| NO | Sequence | % inhibition | Site | Site | NO |
| 532146 | GGCCCCCTGGCACAACAGGA | 60 | 3097 | 3116 | 372 |
| 532147 | TCTAGGGTGATTCAGGTGGA | 62 | 4537 | 4556 | 373 |
| 532148 | CTTAGATTAATGCAAAACAA | 25 | 4875 | 4894 | 374 |
| 532149 | AGGCAGAGGAGGGTGGAACC | 34 | 6246 | 6265 | 375 |
| 532150 | AGTCTAATGAGATCTGATGG | 76 | 6499 | 6518 | 376 |
| 532151 | GCTGAAATGAGTTAAGACTT | 89 | 6737 | 6756 | 377 |
| 532152 | ACTTTGGACTGTGGATTTTT | 78 | 6765 | 6784 | 378 |
| 532153 | GCATATTTACACAATGCCTG | 84 | 6871 | 6890 | 379 |
| 532154 | GGAAATGCCTGGATGTCCAG | 27 | 7241 | 7260 | 380 |
| 532155 | CTGCTGATTTTGGAATGGAG | 68 | 10660 | 10679 | 381 |
| 532156 | ACTGAACACCTATTCTATGG | 51 | 11968 | 11987 | 382 |
| 532157 | TTTACTGAACACCTATTCTA | 23 | 11971 | 11990 | 383 |
| 532158 | CCCTCAAATTATCCACAAAC | 89 | 12053 | 12072 | 384 |
| 532159 | CTTCTAAATGTTTCCAAGGC | 63 | 12186 | 12205 | 385 |
| 532160 | TTACATCCTGTAGGCTAATT | 82 | 12469 | 12488 | 386 |
| 532161 | CCACTAGCCTGGCCAGACTT | 73 | 12487 | 12506 | 387 |
| 532162 | CTGGTAGATGATCTCAAGTT | 84 | 13351 | 13370 | 388 |
| 532163 | AAAGAATTGAGTTATAAATC | 23 | 13670 | 13689 | 389 |
| 532164 | AACTCATCTCTGGCCAGCAG | 89 | 14361 | 14380 | 390 |
| 532165 | CAACATCATTGTATTTTCTG | 33 | 14965 | 14984 | 391 |
| 532166 | TCTTAGCTTACCAATGAGGA | 81 | 15085 | 15104 | 392 |
| 532167 | TTCCCAGAGCCAAAGCTCAA | 77 | 15982 | 16001 | 393 |
| 532168 | TTTGGCCAATCCCAGCTTAT | 59 | 16253 | 16272 | 394 |
| 532169 | GTTTGCAAATCTTCATTCAC | 71 | 16447 | 16466 | 395 |
| 532170 | CAATAGTCCCTGAGGCTTGG | 74 | 16476 | 16495 | 396 |
| 532171 | TTTCCCCAGATTAAATGCCC | 85 | 17650 | 17669 | 397 |
| 532172 | TTCAATAATGCAGTTATTAT | 0 | 18308 | 18327 | 398 |
| 532173 | AAATTCTTGGGCTTAAGCAC | 69 | 18638 | 18657 | 399 |
| 532174 | ACATGTACCCAAACCAACAC | 71 | 18731 | 18750 | 91 |
| 532175 | TGATCCAAATTCAGTACCTA | 82 | 18752 | 18771 | 400 |
| 532176 | GATGATCCAAATTCAGTACC | 54 | 18754 | 18773 | 401 |
| 532177 | CAATATTCATCTTTATATTC | 25 | 19106 | 19125 | 402 |
| 532178 | ATTGCTCTTAAGATAAGTAA | 41 | 19661 | 19680 | 403 |
| 532179 | CAGCTCCCTGAATATCTCTT | 74 | 19783 | 19802 | 404 |
| 532180 | ACTTCACAAATATATTATAA | 0 | 19885 | 19904 | 405 |
| 532181 | GTACAGTCAACTTTACTTCA | 89 | 19899 | 19918 | 406 |
| 532182 | CAATTCCCACTCTTGTCAAC | 55 | 20288 | 20307 | 407 |
| 532183 | TCAACTGCTTTCTGGAGCAG | 66 | 21215 | 21234 | 408 |
| 532184 | ACTGCTGAGCACCTCCAAAA | 73 | 21454 | 21473 | 409 |
| 532185 | CTTAGATTCCTGGTTTATCA | 78 | 21587 | 21606 | 410 |
| 532186 | AGTTATATCAATATTCTCCC | 88 | 21820 | 21839 | 411 |
| 532187 | TATACCATCTTCCCCATAAA | 32 | 22038 | 22057 | 412 |
| 532188 | GGCTTTCTTTAGCAATAGTT | 86 | 22518 | 22537 | 413 |
| 532189 | TACCAGGGATGTAGGTTTAC | 82 | 29050 | 29069 | 414 |
| 532190 | TCACAGCTGAATTCTATCTG | 80 | 29323 | 29342 | 415 |
| 532191 | GGAGATGGACAAATTCCTGC | 77 | 29470 | 29489 | 416 |
| 532192 | CTAGACATGTCATCAAGACA | 19 | 30294 | 30313 | 417 |
| 532193 | CAAATTAATAAAACAATTAC | 10 | 30385 | 30404 | 418 |
| 532194 | TATTCTTATATCAGACAAAA | 30 | 30532 | 30551 | 419 |
| 532195 | TCAAGGGATCCCTGCCATTC | 32 | 32361 | 32380 | 420 |
| 532196 | CGTCAAGGGATCCCTGCCAT | 47 | 32363 | 32382 | 421 |
| 532197 | GGCACTCCCAGTCTCCAGCT | 83 | 34138 | 34157 | 422 |
| 532198 | TTTCTCCAGCAGAAGTGTCA | 60 | 34845 | 34864 | 423 |
| 532199 | AAGTCCTCTTCCGCCTCCCT | 82 | 36023 | 36042 | 424 |
| 532200 | GGAATTTACCAAAAACAGTT | 63 | 36721 | 36740 | 425 |
| 532201 | AGTTAGGTATTGTCCATTTT | 74 | 37032 | 37051 | 426 |
| 532202 | ACATGGGTATCTTCTAGGAA | 77 | 37111 | 37130 | 427 |
| 532203 | TCAGTTTCAGAGAGACAAAA | 41 | 37276 | 37295 | 428 |
| 532204 | TTTGCCAGGTCCTATGTCGA | 69 | 37656 | 37675 | 429 |
| 532205 | ATTCCCTTTTCTCTACAACC | 70 | 38099 | 38118 | 430 |
| 532206 | ATGATAAGAGCCAAGATTTG | 13 | 38994 | 39013 | 431 |
| 532207 | GAAAAAAGGTCCACTGTGGT | 49 | 40356 | 40375 | 432 |
| 532208 | CCTGTCCTGGAATAGTTTCA | 49 | 41164 | 41183 | 433 |
| 532209 | TAGAAAAGTAAATAAGGAAT | 15 | 41501 | 41520 | 434 |
| 532210 | TTATAAAACTATGCAATAGG | 0 | 41889 | 41908 | 435 |
| 532211 | TTATTTCATATTTCCAGAAA | 0 | 42675 | 42694 | 436 |
| 532212 | CATGAATTACAGCTAAAGAT | 20 | 42741 | 42760 | 437 |
| 532213 | TTGCATGTATGTGTTTCTGA | 62 | 43518 | 43537 | 438 |
| 532214 | TCAATCTCTTTATACCCTTA | 75 | 43765 | 43784 | 439 |
| 532215 | TCTTCAATCTCTTTATACCC | 58 | 43768 | 43787 | 440 |
| 532216 | CTATGCCCTAGTTACTTCTA | 47 | 43972 | 43991 | 441 |
| 532217 | AAAGAGAATCTCTTCCTTTT | 27 | 44070 | 44089 | 442 |
| 532218 | TCATTAAAGATTATTATAAC | 0 | 44222 | 44241 | 443 |
| 532219 | TTTGGATGAGTGGAAGGCTA | 0 | 44528 | 44547 | 444 |
| 532220 | GGAAATGGCCTTTTTCCTTA | 72 | 45400 | 45419 | 445 |
| 532221 | GGAGAAGCCCTCTGCCTGTA | 60 | 46477 | 46496 | 446 |
| 532222 | AAACCATATTGTCCACCAGA | 84 | 46510 | 46529 | 447 |

TABLE 129
Inhibition of GHR mRNA by 5-10-5 MOE gapmers targeting
intron 1 of SEQ ID NO: 2

| | | | SEQ | | |
|---|---|---|---|---|---|
| | | | ID | SEQ ID | |
| | | | NO: 2 | NO: 2 | |
| ISIS | | | Start | Stop | SEQ ID |
| NO | Sequence | % inhibition | Site | Site | NO |
| 532223 | CTCAAACCATATTGTCCACC | 90 | 46513 | 46532 | 448 |
| 532224 | GTGTAAATAGTGACTTGTAC | 76 | 50123 | 50142 | 449 |
| 532225 | TGAGGCACAGGAAAGTTAAC | 52 | 50719 | 50738 | 450 |
| 532226 | AGCTATAGTTCTCCATTAGG | 74 | 50954 | 50973 | 451 |
| 532227 | TTACTTGCTGACTAAGCCAT | 69 | 51071 | 51090 | 452 |
| 532228 | GTTTGTCAACTCAACATCAA | 73 | 51215 | 51234 | 453 |
| 532229 | GACTATTTGTATATATATAC | 33 | 51491 | 51510 | 454 |
| 532230 | ATGACTATTTGTATATATAT | 11 | 51493 | 51512 | 455 |
| 532231 | ACTCTTCCTTATATTTGCTC | 76 | 51778 | 51797 | 456 |
| 532232 | ATACACTGACTTTTAACATT | 67 | 52039 | 52058 | 457 |
| 532233 | CTTAGAAACAGTAGTTTCAT | 42 | 52124 | 52143 | 458 |
| 532234 | CTGAGCTTTGCCTTAAGAAT | 79 | 52633 | 52652 | 459 |
| 532235 | CACCAGACAGCAGGTAGAGC | 81 | 53540 | 53559 | 460 |
| 532236 | GAGATGGAGTAGAAGGCAAA | 43 | 55926 | 55945 | 461 |
| 532237 | TAGGAAAGGAAGAATACACT | 33 | 63881 | 63900 | 462 |
| 532238 | TAGACCAGGAAGGGTGAGAG | 27 | 64376 | 64395 | 463 |
| 532239 | AAGTTGGATCTGGCATGCAT | 64 | 64574 | 64593 | 464 |
| 532240 | AAAGTTGGATCTGGCATGCA | 70 | 64575 | 64594 | 465 |
| 532241 | CCATAACTCTTCTAACTGGG | 84 | 64643 | 64662 | 466 |
| 532242 | ATATTAAAGTTTGAGAACTA | 37 | 65080 | 65099 | 467 |
| 532243 | CTTAACTACAAAATGCTGGA | 71 | 66164 | 66183 | 468 |
| 532244 | TGAGCAGCTGTCCTCAGTTC | 43 | 67061 | 67080 | 469 |
| 532245 | GAGTTCATAAAAGTTTTACT | 26 | 67251 | 67270 | 470 |
| 532246 | CTATCCACACCATTCCATAA | 73 | 69203 | 69222 | 471 |
| 532247 | AACATCTAAGTAATGCAAAC | 58 | 69223 | 69242 | 472 |
| 532248 | TTTGCATTCAAAGCCCTGGG | 91 | 69565 | 69584 | 473 |
| 532249 | TCCATATTATAGGCTATGAT | 73 | 69889 | 69908 | 474 |
| 532250 | ATTTTATGATAATGTAAAAC | 27 | 69942 | 69961 | 475 |
| 532251 | GAGATCACATTTTCTGAGTA | 50 | 70352 | 70371 | 476 |
| 532252 | ACCTCCCTAGGATTACCTCA | 56 | 71617 | 71636 | 477 |
| 532253 | AAAATCTGATTTATAATCAA | 40 | 71750 | 71769 | 478 |
| 532254 | AGCATAGATTTTGACTTCCC | 92 | 72107 | 72126 | 479 |
| 532255 | AAAGTCATATACACAGGTCT | 53 | 72584 | 72603 | 480 |
| 532256 | CTCATAGCAAATTCCCAGAA | 66 | 73689 | 73708 | 481 |
| 532257 | CAACATGGAGGCTAGCATGT | 55 | 74112 | 74131 | 482 |
| 532258 | AGACTAAGTGGCCTGAATGT | 52 | 74317 | 74336 | 483 |
| 532259 | ACCTACCATGTCACTCTCAA | 61 | 74418 | 74437 | 484 |
| 532260 | AACTTTCTTGTGTTTTATCA | 9 | 75511 | 75530 | 485 |
| 532261 | TTTGCAAGACAAAGAAATGA | 31 | 75915 | 75934 | 486 |
| 532262 | CATGCAAAGTGTTCCTCTTC | 63 | 76024 | 76043 | 487 |
| 532263 | AGTGCTTTGCTTTCTCTTAT | 79 | 76047 | 76066 | 488 |
| 532264 | GAACAAGAAACACTTGGTAA | 44 | 76555 | 76574 | 489 |
| 532265 | AGTGTTCCAATTAAATGGCA | 34 | 76643 | 76662 | 490 |
| 532266 | AAACAATGCCCTTGTAGTGA | 57 | 76703 | 76722 | 491 |
| 532267 | TATTCTAGGTTTTGAGGTGA | 60 | 76752 | 76771 | 492 |
| 532268 | ATATTCTAGGTTTTGAGGTG | 24 | 76753 | 76772 | 493 |
| 532269 | GTTTTCCATTCTTTAAGAAA | 41 | 76896 | 76915 | 494 |
| 532270 | AGCAATCCATTGATTGTATG | 59 | 77044 | 77063 | 495 |
| 532271 | AATTATGGCAAAATGGAAAA | 37 | 77076 | 77095 | 496 |
| 532272 | ACATTTGCTTATGAGACTAT | 62 | 77638 | 77657 | 497 |
| 532273 | GCAGAGATAATCCTATGATG | 42 | 77841 | 77860 | 498 |
| 532274 | TCCATCTGTTACCTCTCTGT | 77 | 78122 | 78141 | 499 |
| 532275 | TTTGCCTGAAGGGCAGAACC | 40 | 79478 | 79497 | 500 |
| 532276 | GAAAAAATCAGATTTTCACA | 0 | 79664 | 79683 | 501 |
| 532277 | AACTTAATTTAATCATTTCT | 0 | 79959 | 79978 | 502 |
| 532278 | TTTGGTTGTCATGAGTTGAG | 67 | 80756 | 80775 | 503 |
| 532279 | TTCCATCTCTAGGGCACTTT | 74 | 80900 | 80919 | 504 |
| 532280 | AGAGCTTATTTTCAAAATTC | 36 | 80920 | 80939 | 505 |
| 532281 | ATAAAGAGCAAACAAACATA | 42 | 81524 | 81543 | 506 |
| 532282 | TATAAATTCCTTGGTCTGAT | 33 | 82835 | 82854 | 507 |
| 532283 | AAAATATAAATTCCTTGGTC | 13 | 82839 | 82858 | 508 |
| 532284 | TTTTATAACAGCCTCTGACA | 38 | 82959 | 82978 | 509 |
| 532285 | AAAAGACCATGTTGCTTATT | 72 | 83179 | 83198 | 510 |
| 532286 | ATAGTCAGTCAGAATGTGGT | 72 | 83330 | 83349 | 511 |
| 532287 | TGCCTTAGCTTGGAAAAGAC | 78 | 83897 | 83916 | 512 |
| 532288 | AGGGCTAGCTGATGCCTCTC | 69 | 84026 | 84045 | 513 |
| 532289 | TTGGACTGGGCTCAAACAGA | 72 | 84381 | 84400 | 514 |
| 532290 | AAAGTCAGGCTAGAGGGACT | 49 | 85713 | 85732 | 515 |
| 532291 | TCCTTGTTTTCTTGTAATGA | 50 | 85945 | 85964 | 516 |
| 532292 | ACACCAGAGGAAGGAAATCA | 44 | 86554 | 86573 | 517 |
| 532293 | GATGTACACCATTTTGAATT | 15 | 86629 | 86648 | 518 |
| 532294 | TGCTCTGGCCTAGCCTATGT | 62 | 86901 | 86920 | 519 |
| 532295 | CAGAGGTGTCTCCCAAGAAA | 60 | 89940 | 89959 | 520 |
| 532296 | AAAGAGAATGGATCAAAGCT | 36 | 91930 | 91949 | 521 |
| 532297 | GATTTGCAGAACAAATCTTG | 37 | 93332 | 93351 | 522 |
| 532298 | TGGTTATGAAGGTTGGACCA | 52 | 94839 | 94858 | 523 |
| 532299 | TGGCTAATTAATGGGCAATT | 63 | 95292 | 95311 | 524 |

TABLE 130
Inhibition of GHR mRNA by 5-10-5 MOE gapmers targeting
intron 1 of SEQ ID NO: 2

| | | | SEQ | SEQ | |
|---|---|---|---|---|---|
| | | | ID | ID | |
| | | | NO: 2 | NO: 2 | |
| ISIS | | | Start | Stop | SEQ ID |
| NO | Sequence | % inhibition | Site | Site | NO |
| 532300 | CTGTGCCATATTGCCTCTAA | 87 | 95471 | 95490 | 525 |
| 532301 | GATTTCAACCAGCTCACCTG | 48 | 95510 | 95529 | 526 |
| 532302 | GCAAAAGGGAACCCTGAAGC | 71 | 95564 | 95583 | 527 |
| 532303 | CTAAGTGTTATAACAAACAC | 43 | 96137 | 96156 | 528 |
| 532304 | GTCCATTGGTATAAAACTCA | 84 | 96282 | 96301 | 529 |
| 532305 | TTTCAATACAATAAGATTTA | 34 | 96793 | 96812 | 530 |
| 532306 | GTCCTTAGACCCCTCAATGG | 62 | 96987 | 97006 | 531 |
| 532307 | GAGGATTTATTCATCTAGGC | 68 | 97806 | 97825 | 532 |
| 532308 | CAGTGGGAGGATCAGATATC | 46 | 97870 | 97889 | 533 |
| 532309 | ATCCCATCCAGCAGCTGGAC | 67 | 98132 | 98151 | 534 |
| 532310 | AACTTGGGATGAGTTACTGA | 56 | 98653 | 98672 | 535 |
| 532311 | GAAGGCTACCTAAAAGAAAT | 43 | 98810 | 98829 | 536 |
| 532312 | AAAGAAATATTCACAACATT | 39 | 99096 | 99115 | 537 |
| 532313 | ATGCTTATACTGCTGCTGTA | 69 | 99791 | 99810 | 538 |
| 532314 | TCCTCACTTCAATCACCTTT | 70 | 99819 | 99838 | 539 |
| 532315 | CTCTTTCTTCATAAATAAGT | 33 | 100809 | 100828 | 540 |
| 532316 | TGGTAATCTGTGTCCCTTTA | 96 | 101242 | 101261 | 541 |
| 532317 | TAATAAAAAAGTTTGAAACA | 41 | 102549 | 102568 | 542 |
| 532318 | GGTGGTGGCAAGAGAAAAAT | 56 | 103015 | 103034 | 543 |
| 532319 | CAAAAGGCCCTTTTTACATG | 28 | 103034 | 103053 | 544 |
| 532320 | ACTCTACTGGTACCAATTTA | 31 | 103173 | 103192 | 545 |
| 532321 | TCTGAACTTTTATGCTCTGT | 76 | 103606 | 103625 | 546 |
| 532322 | AACTTTTGCCTGGGCATCCA | 16 | 104067 | 104086 | 547 |
| 532323 | TGACTCCATGTCTCACATCC | 66 | 104392 | 104411 | 548 |
| 532324 | TTACTTCCTAGATACAACAG | 53 | 104541 | 104560 | 549 |
| 532325 | CTGGCCCCCATGATTCAATT | 44 | 104835 | 104854 | 550 |
| 532326 | AAGACTGGCCCCCATGATTC | 49 | 104839 | 104858 | 551 |
| 532327 | TGTCACTGGTCTGTGTATTT | 60 | 106233 | 106252 | 552 |
| 532328 | ACAGAGTAGATTTAGCATAA | 23 | 106980 | 106999 | 553 |
| 532329 | TAAACAGGTGTACTATTACA | 27 | 107030 | 107049 | 554 |
| 532330 | GCTTTATCAACTAAGTTTAT | 22 | 107716 | 107735 | 555 |
| 532331 | CAGAACTTCTTTTAAAATTG | 8 | 107763 | 107782 | 556 |
| 532332 | GAATACAGACATACCTTGAA | 25 | 108514 | 108533 | 557 |
| 532333 | CCATGACAACAATTTCAGAG | 58 | 109486 | 109505 | 558 |
| 532334 | ACAAATAGCAATGAATGGGT | 45 | 110878 | 110897 | 559 |
| 532335 | CAACAAATAGCAATGAATGG | 47 | 110880 | 110899 | 560 |
| 532336 | GTACACAAATCAGTAGCTCT | 72 | 115087 | 115106 | 561 |
| 532337 | CTATGTCAAAAAGACTGAAA | 4 | 116370 | 116389 | 562 |
| 532338 | ATATACAGAACATTTCATCC | 13 | 116743 | 116762 | 563 |
| 532339 | AGAATAGATAAGAACTCACC | 32 | 117195 | 117214 | 564 |
| 532340 | AGGAAAGATACAGTCATTTT | 5 | 117507 | 117526 | 565 |
| 532341 | GCACAAAGAACACCTGGGAA | 43 | 117781 | 117800 | 566 |
| 532342 | CAAGAAGTCTGGGATTATGT | 0 | 117938 | 117957 | 567 |
| 532343 | GTTAGTTATTAAGCTAATCA | 48 | 118245 | 118264 | 568 |
| 532344 | AACCATTATTTATAGGCTAA | 14 | 119127 | 119146 | 569 |
| 532345 | CCAGAATGCGATCACTTCTT | 76 | 120826 | 120845 | 570 |
| 532346 | CCAGAAATTATCCTCCTCTC | 70 | 121209 | 121228 | 571 |
| 532347 | AGGGAAATGCAAATTAAAAC | 20 | 122479 | 122498 | 572 |
| 532348 | GCATCAAGATACAGAAAAAT | 24 | 122751 | 122770 | 573 |
| 532349 | GAATGTTTATGAGATTTTTC | 0 | 123571 | 123590 | 574 |
| 532350 | GCCAATTATATTGCCACATT | 23 | 124413 | 124432 | 575 |
| 532351 | ATACTTGCTTATGTAGAAAT | 45 | 124589 | 124608 | 576 |
| 532352 | TAATACTTGCTTATGTAGAA | 3 | 124591 | 124610 | 577 |
| 532353 | GAACACATGGCATTCTGATA | 36 | 125178 | 125197 | 578 |
| 532354 | CAGAATTTGCAGTATAAATC | 0 | 126051 | 126070 | 579 |
| 532355 | TATGTTTTGAAATCTTATTT | 0 | 126157 | 126176 | 580 |
| 532356 | ACTCACTGCTACCTCATTAA | 11 | 126998 | 127017 | 581 |
| 532357 | AAGCAGTGATAGGGTATCTG | 59 | 127080 | 127099 | 582 |
| 532358 | ATGAGGCCTATTACAATGGA | 14 | 127170 | 127189 | 583 |
| 532359 | CTGGAGTCTCATGAGGCCTA | 53 | 127180 | 127199 | 584 |
| 532360 | TGACTATCAGCCTTTTAATC | 45 | 127663 | 127682 | 585 |
| 532361 | TTCAGAGAACAACCTTTGAA | 0 | 127959 | 127978 | 586 |
| 532362 | AGCCATGTGTGATCTGATGT | 53 | 128813 | 128832 | 587 |
| 532363 | GAAATTTACTCCAAACTAGC | 17 | 128992 | 129011 | 588 |
| 532364 | AACATCCAGACCACCATCTA | 35 | 130094 | 130113 | 589 |
| 532365 | GTACCAAACCATTCATGCTC | 56 | 131036 | 131055 | 590 |
| 532366 | AGTACCAAACCATTCATGCT | 24 | 131037 | 131056 | 591 |
| 532367 | TTATAGAGCTTGAGATTGAC | 7 | 132165 | 132184 | 592 |
| 532368 | AGTCCATTATAGAGCTTGAG | 58 | 132171 | 132190 | 593 |
| 532369 | AACCATGAGATGCAATGCAG | 40 | 132498 | 132517 | 594 |
| 532370 | AGGATTGAGAATCGCTGATT | 42 | 133168 | 133187 | 595 |
| 532371 | TCTAAAGCATGGCCAGGATT | 48 | 133182 | 133201 | 596 |
| 532372 | GGGACTGAGTATTGATACTT | 44 | 133222 | 133241 | 597 |
| 532373 | AGAAGTAGGGTGTTCCAGAT | 29 | 133523 | 133542 | 598 |
| 532374 | AGAAATAGTCTTCCTACTAA | 0 | 133547 | 133566 | 599 |
| 532375 | GCCTCCTTTAAGCTTCTATG | 22 | 134240 | 134259 | 600 |
| 532376 | GGCCTGCCTTTACTTTCCCA | 36 | 134598 | 134617 | 601 |

TABLE 131
Inhibition of GHR mRNA by 5-10-5 MOE gapmers targeting introns
1 and 2 of SEQ ID NO: 2

| | SEQ | SEQ | | | | | | |
|---|---|---|---|---|---|---|---|---|
| | ID | ID | | | | SEQ | SEQ | |
| | NO: 1 | NO: 1 | | | | ID NO: | ID NO: | SEQ |
| ISIS | Start | Stop | | Target | % | 2 Start | 2 Stop | ID |
| NO | Site | Site | Sequence | region | inhibition | Site | Site | NO |
| 523638 | n/a | n/a | ACCTCAGTGGACTCTTTCCA | Intron 1 | 4 | 84684 | 84703 | 602 |
| 523639 | n/a | n/a | CAAACCTAAGTTCAAGTCCT | Intron 1 | 62 | 85523 | 85542 | 603 |
| 523640 | n/a | n/a | AGTTTCACTTCTTGAATCAA | Intron 1 | 38 | 86373 | 86392 | 604 |
| 523641 | n/a | n/a | AAGATCAAATGAGGTCAAGG | Intron 1 | 30 | 87181 | 87200 | 605 |
| 523642 | n/a | n/a | TAGATACAAATTTCATCACA | Intron 1 | 23 | 88063 | 88082 | 606 |
| 523643 | n/a | n/a | ATTCCTAAAATAGGAGCAGG | Intron 1 | 45 | 88870 | 88889 | 607 |
| 523644 | n/a | n/a | TTTTTATGTTGTATAAGATA | Intron 1 | 0 | 89670 | 89689 | 608 |
| 523645 | n/a | n/a | GTTCAGCCAATACATGAGTA | Intron 1 | 48 | 90473 | 90492 | 609 |
| 523646 | n/a | n/a | CCAGAGGGAGTTCATTACCA | Intron 1 | 62 | 91273 | 91292 | 610 |
| 523647 | n/a | n/a | TCTCTCTAATTCAACCTTAT | Intron 1 | 44 | 92107 | 92126 | 611 |
| 523648 | n/a | n/a | ATAATCCTCAGACCTCTTTA | Intron 1 | 29 | 92925 | 92944 | 612 |
| 523649 | n/a | n/a | CACTGTGGCAGAATTCCAAG | Intron 1 | 28 | 93762 | 93781 | 613 |
| 523650 | n/a | n/a | ACACCTTGGTGCCTAGAAGC | Intron 1 | 54 | 94581 | 94600 | 614 |
| 523651 | n/a | n/a | GTAGCAATGACACCTAAGAA | Intron 1 | 58 | 95394 | 95413 | 615 |
| 523652 | n/a | n/a | TTTAAAATAATAAATGCTTA | Intron 1 | 0 | 96194 | 96213 | 616 |
| 523653 | n/a | n/a | TCATTTGGTCCTTAGACCCC | Intron 1 | 27 | 96994 | 97013 | 617 |
| 523654 | n/a | n/a | TTATTCATCTAGGCCGAGTG | Intron 1 | 57 | 97800 | 97819 | 618 |
| 523655 | n/a | n/a | TTGCAGAATCTTCTCTTTGG | Intron 1 | 65 | 98627 | 98646 | 619 |
| 523656 | n/a | n/a | ACCATAAAGCTATGCCATAA | Intron 1 | 63 | 99481 | 99500 | 620 |
| 523657 | n/a | n/a | GGCAAGGAGCACAATAGGAC | Intron 1 | 20 | 100281 | 100300 | 621 |
| 523658 | n/a | n/a | ACCCAAAAAGTTGAGCTGAG | Intron 1 | 66 | 101081 | 101100 | 622 |
| 523659 | n/a | n/a | TAGATTTTCAGACTCTTTCT | Intron 1 | 46 | 101887 | 101906 | 623 |
| 523660 | n/a | n/a | AATTTCAATATTGTTGTGTT | Intron 1 | 0 | 102760 | 102779 | 624 |
| 523661 | n/a | n/a | ATGCTTTTAATGGCACCCAA | Intron 1 | 69 | 103569 | 103588 | 625 |
| 523662 | n/a | n/a | CATGTCTCACATCCAGGTCA | Intron 1 | 37 | 104386 | 104405 | 626 |
| 523663 | n/a | n/a | TTCACTGGAGTAGACTTTTA | Intron 1 | 45 | 105255 | 105274 | 627 |
| 523664 | n/a | n/a | CTTATAAGGGAGGTCTGGTA | Intron 1 | 41 | 106147 | 106166 | 628 |
| 523665 | n/a | n/a | GCATAATTCTTAAGGGCCCT | Intron 1 | 71 | 106966 | 106985 | 629 |
| 523666 | n/a | n/a | CCACAGAACTTCTTTTAAAA | Intron 1 | 27 | 107766 | 107785 | 630 |
| 523667 | n/a | n/a | GGTGACCATGATTTTAACAA | Intron 1 | 25 | 108566 | 108585 | 631 |
| 523668 | n/a | n/a | AACAGCTGCATGACAATTTT | Intron 1 | 50 | 109382 | 109401 | 632 |
| 523669 | n/a | n/a | AGAAACAGAATCAGTGACTT | Intron 1 | 44 | 110403 | 110422 | 633 |
| 523670 | n/a | n/a | CAGATTCCAGAGAAAAGCCA | Intron 1 | 14 | 111203 | 111222 | 634 |
| 523671 | n/a | n/a | TGTGAGAAGAACTCTATCAC | Intron 1 | 12 | 112030 | 112049 | 635 |
| 523672 | n/a | n/a | CTCACAAATCACCACTAAAG | Intron 1 | 31 | 112842 | 112861 | 636 |
| 523673 | n/a | n/a | CAACGAGTGGATAAAGAAAC | Intron 1 | 28 | 113646 | 113665 | 637 |
| 523674 | n/a | n/a | ATAAAACTGGATCCTCATCT | Intron 1 | 13 | 114446 | 114465 | 638 |
| 523675 | n/a | n/a | ATTAAAACTCTCAGCAAAAT | Intron 1 | 0 | 115450 | 115469 | 639 |
| 523676 | n/a | n/a | AAAGACTGAAAGAACACAAA | Intron 1 | 0 | 116361 | 116380 | 640 |
| 523677 | n/a | n/a | TATCTGCTGCCTTCAGGAGA | Intron 1 | 0 | 117168 | 117187 | 641 |
| 523678 | n/a | n/a | TTTGAATTAACCCAATTCAA | Intron 1 | 0 | 117999 | 118018 | 642 |
| 523679 | n/a | n/a | TCTTAATTTACAACAGAGGA | Intron 1 | 25 | 118821 | 118840 | 643 |
| 523680 | n/a | n/a | AGAAAAGTGACAGGCTTCCC | Intron 1 | 31 | 119659 | 119678 | 644 |
| 523681 | n/a | n/a | ATGTTCCTTGAAGATCCCAA | Intron 1 | 37 | 120478 | 120497 | 645 |
| 523682 | n/a | n/a | ATGAATAACACTTGCCACAA | Intron 1 | 0 | 121379 | 121398 | 646 |
| 523683 | n/a | n/a | GTATGTTTATCACAGCACAG | Intron 1 | 56 | 122180 | 122199 | 647 |
| 523684 | n/a | n/a | AAACACTGCAATATTAGGTT | Intron 1 | 34 | 123031 | 123050 | 648 |
| 523685 | n/a | n/a | GATTGGTGCTTTTCAAACTG | Intron 1 | 39 | 123936 | 123955 | 649 |
| 523686 | n/a | n/a | ATTTGTAAGACAAACATGAA | Intron 1 | 9 | 124764 | 124783 | 650 |
| 523687 | n/a | n/a | TCACATGACTATGTTCTGGC | Intron 1 | 72 | 125594 | 125613 | 651 |
| 523688 | n/a | n/a | AGTCCTGTCCACACTATTAA | Intron 1 | 6 | 126415 | 126434 | 652 |
| 523689 | n/a | n/a | CTGGGCTCTGCCTGCTGAAC | Intron 1 | 17 | 127217 | 127236 | 653 |
| 523690 | n/a | n/a | AAAACCCTTAAGTATTTCCT | Intron 1 | 12 | 128054 | 128073 | 654 |
| 523691 | n/a | n/a | CTCTGTTTCAAACCCCCCAG | Intron 1 | 21 | 128854 | 128873 | 655 |
| 523692 | n/a | n/a | GGACAGAACACCAATCACAA | Intron 1 | 18 | 129654 | 129673 | 656 |
| 523693 | n/a | n/a | ACCTACCCTTCAAAGTCACG | Intron 1 | 0 | 130486 | 130505 | 657 |
| 523694 | n/a | n/a | TTCAGTTCCCAGGAGGCTTA | Intron 1 | 5 | 131286 | 131305 | 658 |
| 523695 | n/a | n/a | TTTTGCAATGTCTAGCAATT | Intron 1 | 0 | 132086 | 132105 | 659 |
| 523696 | n/a | n/a | ATTAAGATCAGAAAATATTA | Intron 1 | 0 | 132953 | 132972 | 660 |
| 523697 | n/a | n/a | TTAATGAGATATTTTGCACC | Intron 1 | 34 | 133858 | 133877 | 661 |
| 523698 | n/a | n/a | GAGAGGTTAAGTAAATCTCC | Intron 1 | 0 | 134678 | 134697 | 662 |
| 523699 | n/a | n/a | CAGACTCAAATTTGAAAATT | Intron 1 | 14 | 135500 | 135519 | 663 |
| 523700 | n/a | n/a | GATAAGGCAATAATACAGCC | Intron 1 | 1 | 136306 | 136325 | 664 |
| 523701 | n/a | n/a | ATCATTTGCCAATTTCTGTG | Intron 1 | 28 | 137133 | 137152 | 665 |
| 523702 | n/a | n/a | CAAGAAGAAAAGATGCAAAA | Intron 1 | 0 | 138035 | 138054 | 666 |
| 523703 | n/a | n/a | AATTTATTTCCTTCCTATGA | Intron 1 | 0 | 138857 | 138876 | 667 |
| 523704 | n/a | n/a | TTTTGGAAATGTGAGAAACG | Intron 1 | 0 | 139771 | 139790 | 668 |
| 523705 | n/a | n/a | AAACACATGAGAAAAGATGA | Intron 1 | 0 | 140593 | 140612 | 669 |
| 523706 | n/a | n/a | TGTTGGCTCAGTGGGAATGA | Intron 1 | 0 | 141412 | 141431 | 670 |
| 523707 | n/a | n/a | TGAACAGGTTTGCATTTCTC | Intron 1 | 42 | 142229 | 142248 | 671 |
| 523708 | n/a | n/a | TCCTAGGTGAACAGGCTATG | Intron 1 | 38 | 143029 | 143048 | 672 |
| 523709 | n/a | n/a | CCCTAATCAGGCTGAAATAA | Intron 1 | 0 | 143829 | 143848 | 673 |
| 523710 | n/a | n/a | AGGGCCAGTAAGGTTTGCTT | Intron 1 | 12 | 144631 | 144650 | 674 |
| 523711 | n/a | n/a | AGCCTGAATTCTGAGCTCTG | Intron 2 | 88 | 145431 | 145450 | 675 |
| 523712 | n/a | n/a | AGAGGATCTCAGCTGCAATT | Intron 2 | 71 | 146238 | 146257 | 676 |
| 523713 | n/a | n/a | GAAAATCCCTGCTCAAGTGC | Intron 2 | 67 | 147262 | 147281 | 677 |
| 523714 | n/a | n/a | TGCCTGATATTGTAATTCTT | Intron 2 | 90 | 148062 | 148081 | 678 |

TABLE 132
Inhibition of GHR mRNA by 5-10-5 MOE gapmers targeting introns
1 and 2 of SEQ ID NO: 2

| | | | | SEQ | SEQ | |
|---|---|---|---|---|---|---|
| | | | | ID | ID | |
| | | | | NO: 2 | NO: 2 | SEQ |
| ISIS | | Target | % | Start | Stop | ID |
| NO | Sequence | Region | inhibition | Site | Site | NO |
| 532377 | CTCATACAGTGAAGTCTTCA | Intron 1 | 73 | 135431 | 135450 | 679 |
| 532378 | CTCACTAAGCTTGATTCACT | Intron 1 | 67 | 135818 | 135837 | 680 |
| 532379 | GATACAGAAATCCCAGTGAC | Intron 1 | 46 | 136111 | 136130 | 681 |
| 532380 | TGTGCTTGGGTGTACAGGCA | Intron 1 | 71 | 136282 | 136301 | 682 |
| 532381 | TCAAGCACTTACATCATATG | Intron 1 | 42 | 136377 | 136396 | 683 |
| 532382 | AGGGTTAGTTATTACACTTA | Intron 1 | 60 | 136576 | 136595 | 684 |
| 532383 | AGGCTTCATGTGAGGTAACA | Intron 1 | 58 | 136996 | 137015 | 685 |
| 532384 | TGAAAGCTTAGTACAAGAAG | Intron 1 | 51 | 138048 | 138067 | 686 |
| 532385 | CTCTCCTCTTGGAGATCCAG | Intron 1 | 58 | 138782 | 138801 | 687 |
| 532386 | GCTGAGATTTCTCTCCTCTT | Intron 1 | 78 | 138792 | 138811 | 688 |
| 532387 | CTTTTGCTGAGATTTCTCTC | Intron 1 | 58 | 138797 | 138816 | 689 |
| 532388 | GAACATATGTCCATAGAATG | Intron 1 | 57 | 141700 | 141719 | 690 |
| 532389 | GAACAGGCTATGTAATCAAA | Intron 1 | 68 | 143021 | 143040 | 691 |
| 532390 | TTTTTATTACTGTGCAAACC | Intron 1 | 41 | 143878 | 143897 | 692 |
| 532391 | ACTGAGGGTGGAAATGGAAA | Intron 2 | 23 | 145059 | 145078 | 693 |
| 532392 | ATGCCATACTTTTCATTTCA | Intron 2 | 87 | 146351 | 146370 | 694 |
| 532393 | TCTTTAAAGATTTCCTATGC | Intron 2 | 66 | 146367 | 146386 | 695 |
| 532394 | TCACAATTAAATTATGTTTA | Intron 2 | 47 | 149858 | 149877 | 696 |
| 532395 | TTTGCCATCACCAAACACCA | Intron 2 | 94 | 150972 | 150991 | 697 |
| 532396 | TCAGAATGCTGAAGGATGGG | Intron 2 | 70 | 152208 | 152227 | 698 |
| 532397 | ACAATTGCAGGAGAGAACTG | Intron 2 | 57 | 152296 | 152315 | 699 |
| 532398 | GTTCAGTCACCTGGAAAGAG | Intron 2 | 62 | 152549 | 152568 | 700 |
| 532399 | CGGAGTTCAGTCACCTGGAA | Intron 2 | 77 | 152553 | 152572 | 701 |
| 532400 | AATCTAAAGTTCAATGTCCA | Intron 2 | 77 | 152752 | 152771 | 702 |
| 532401 | CCACCTTTGGGTGAATAGCA | Intron 2 | 95 | 153921 | 153940 | 703 |
| 532402 | CAACATCAAAAGTTTCCACC | Intron 2 | 81 | 153936 | 153955 | 704 |
| 532403 | AAGCTTCTATCAACCAACTG | Intron 2 | 87 | 154093 | 154112 | 705 |
| 532404 | ACCATTTTCTAATAATTCAC | Intron 2 | 46 | 154502 | 154521 | 706 |
| 532405 | ACCTGCACTTGGACAACTGA | Intron 2 | 60 | 154727 | 154746 | 707 |
| 532406 | GTCAGTGCTTTGGTGATGTA | Intron 2 | 11 | 155283 | 155302 | 708 |
| 532407 | TAGAAGCACAGGAACTAGAG | Intron 2 | 68 | 155889 | 155908 | 709 |
| 532408 | TTTAATTTTATTAGAAGCAC | Intron 2 | 14 | 155900 | 155919 | 710 |
| 532409 | GAGCAAGAATTAAGAAAATC | Intron 2 | 29 | 155973 | 155992 | 711 |
| 532410 | CTCTGCAGTCATGTACACAA | Intron 2 | 93 | 156594 | 156613 | 712 |
| 532411 | GCTTGGTTTGTCAATCCTTT | Intron 2 | 95 | 156889 | 156908 | 713 |
| 532412 | GTTCTCAAGCAGGAGCCATT | Intron 2 | 70 | 157330 | 157349 | 714 |
| 532413 | AGGGTGATCTTCCAAAACAA | Intron 2 | 87 | 158612 | 158631 | 715 |
| 532414 | TCTCCTATGCTTCCTTTAAT | Intron 2 | 25 | 158813 | 158832 | 716 |
| 532415 | GACATAAATATGTTCACTGA | Intron 2 | 81 | 159216 | 159235 | 717 |
| 532416 | TTACTGAGTGACAGTACAGT | Intron 2 | 65 | 161588 | 161607 | 718 |
| 532417 | CCAGGCACCAGCACAGGCAC | Intron 2 | 47 | 161950 | 161969 | 719 |
| 532418 | TTAATGTCAGTAGAAAGCTG | Intron 2 | 0 | 162349 | 162368 | 720 |
| 532419 | GCAGGTGGAAAGAAGATGTC | Intron 2 | 50 | 162531 | 162550 | 721 |
| 532420 | GCCAGGGTCTTTACAAAGTT | Intron 2 | 93 | 162751 | 162770 | 722 |
| 532421 | CATTACCTTTGTACATGTAC | Intron 2 | 83 | 164839 | 164858 | 723 |
| 532422 | GAAGCAACTTCTCTGAGGTC | Intron 2 | 68 | 165040 | 165059 | 724 |
| 532423 | GCCTGGCAAGAAGGGCCCTT | Intron 2 | 56 | 165856 | 165875 | 725 |
| 532424 | ACACATGTTTTTAAATTTAT | Intron 2 | 21 | 166241 | 166260 | 726 |
| 532425 | TCACAATGCACTAAAAGAAA | Intron 2 | 53 | 168760 | 168779 | 727 |
| 532426 | TCCCAATGACTTACTGTAGA | Intron 2 | 78 | 169073 | 169092 | 728 |
| 532427 | TAAGCATTTATGGAGGAATG | Intron 2 | 46 | 169134 | 169153 | 729 |
| 532428 | TGAGGTGGGTGGCCAACAGG | Intron 2 | 66 | 170081 | 170100 | 730 |
| 532429 | GTTTTTCATTTTGATTGCAG | Intron 2 | 88 | 170158 | 170177 | 731 |
| 532430 | AGCTCAAGTGTTTTTCATTT | Intron 2 | 64 | 170167 | 170186 | 732 |
| 532431 | CAATGTCACAGCTGTTTCCT | Intron 2 | 62 | 170272 | 170291 | 733 |
| 532432 | GAACTTTGGAGGCTTTTAGA | Intron 2 | 55 | 170703 | 170722 | 734 |
| 532433 | TGTATGCCCCAAACTCCCAT | Intron 2 | 83 | 171431 | 171450 | 735 |
| 532434 | ACACAAATAAGGGAATAATA | Intron 2 | 24 | 171549 | 171568 | 736 |
| 532435 | TAGTTCAGCCACTATGGAAA | Intron 2 | 47 | 171926 | 171945 | 737 |
| 532436 | CTCCAAATTCCAGTCCTAGG | Intron 2 | 93 | 172746 | 172765 | 738 |
| 532437 | AGTTGGCACTGCTATATCAG | Intron 2 | 66 | 173668 | 173687 | 739 |
| 532438 | GGCCTTAGATTGTAAGTTTT | Intron 2 | 69 | 174122 | 174141 | 740 |
| 532439 | TTTTAGTATTATTGTAGGAA | Intron 2 | 16 | 174188 | 174207 | 741 |
| 532440 | TTTCATTAATGAAACCTGAT | Intron 2 | 39 | 174812 | 174831 | 742 |
| 532441 | CCCTCAGCTGCCTCTTCAAT | Intron 2 | 51 | 175014 | 175033 | 743 |
| 532442 | TATTGTATCCTGGCCCCTAA | Intron 2 | 68 | 175689 | 175708 | 744 |
| 532443 | AGAACAAGAGCCTAGAAGTA | Intron 2 | 35 | 176592 | 176611 | 745 |
| 532444 | GTGACTATGTCACTGAATTT | Intron 2 | 14 | 176918 | 176937 | 746 |
| 532445 | GCCCTACCCAGCAGCCTGTG | Intron 2 | 79 | 177540 | 177559 | 747 |
| 532446 | CAAACATAAAGAGAGTTCCA | Intron 2 | 79 | 177811 | 177830 | 748 |
| 532447 | CTTTAAATGAAGTAGAGCTC | Intron 2 | 0 | 178090 | 178109 | 749 |
| 532448 | CTGTTCAAAGAATGCAGGCC | Intron 2 | 70 | 178905 | 178924 | 750 |
| 532449 | GTCTAGCCTAACAGAGATAT | Intron 2 | 47 | 179137 | 179156 | 751 |
| 532450 | AAAGAGTGATGTCTAGCCTA | Intron 2 | 55 | 179147 | 179166 | 752 |
| 532451 | CACTTCTTACTCCTTTGAGG | Intron 2 | 50 | 179631 | 179650 | 753 |
| 532452 | TTCCACAAGAAACTCAGTTT | Intron 2 | 56 | 181514 | 181533 | 754 |
| 532453 | AGAAATGCCAAAGATAGCTC | Intron 2 | 56 | 182105 | 182124 | 755 |

TABLE 133
Inhibition of GHR mRNA by 5-10-5 MOE gapmers targeting
intron 2 of SEQ ID NO: 2

| | | | SEQ | SEQ | |
|---|---|---|---|---|---|
| | | | ID | ID | |
| | | | NO: 2 | NO: 2 | |
| ISIS | | | Start | Stop | SEQ ID |
| NO | Sequence | % inhibition | Site | Site | NO |
| 533249 | AGCAGAGGATCTCAGCTGCA | 84 | 146241 | 146260 | 756 |
| 533250 | AATCCCTGCTCAAGTGCTAC | 75 | 147259 | 147278 | 757 |
| 533251 | AAATCCCTGCTCAAGTGCTA | 71 | 147260 | 147279 | 758 |
| 533252 | AAAATCCCTGCTCAAGTGCT | 73 | 147261 | 147280 | 759 |
| 533253 | AGAAAATCCCTGCTCAAGTG | 56 | 147263 | 147282 | 760 |
| 533254 | AAGAAAATCCCTGCTCAAGT | 58 | 147264 | 147283 | 761 |
| 533255 | CAAGAAAATCCCTGCTCAAG | 46 | 147265 | 147284 | 762 |
| 533256 | CTGATATTGTAATTCTTGGT | 91 | 148059 | 148078 | 763 |
| 533257 | CCTGATATTGTAATTCTTGG | 90 | 148060 | 148079 | 764 |
| 533258 | GCCTGATATTGTAATTCTTG | 94 | 148061 | 148080 | 765 |
| 533259 | ATGCCTGATATTGTAATTCT | 91 | 148063 | 148082 | 766 |
| 533260 | AATGCCTGATATTGTAATTC | 74 | 148064 | 148083 | 767 |
| 533261 | CAATGCCTGATATTGTAATT | 76 | 148065 | 148084 | 768 |
| 533262 | AATTATGTGCTTTGCCTGCA | 92 | 148904 | 148923 | 769 |
| 533263 | CAATTATGTGCTTTGCCTGC | 83 | 148905 | 148924 | 770 |
| 533264 | TCAATTATGTGCTTTGCCTG | 83 | 148906 | 148925 | 771 |
| 533265 | TGTCAATTATGTGCTTTGCC | 91 | 148908 | 148927 | 772 |
| 533266 | ATGTCAATTATGTGCTTTGC | 83 | 148909 | 148928 | 773 |
| 533267 | GATGTCAATTATGTGCTTTG | 74 | 148910 | 148929 | 774 |
| 533268 | CTGGTGACTCTGCCTGATGA | 77 | 151385 | 151404 | 775 |
| 533269 | GCTGGTGACTCTGCCTGATG | 87 | 151386 | 151405 | 776 |
| 533270 | TGCTGGTGACTCTGCCTGAT | 89 | 151387 | 151406 | 777 |
| 533271 | GCTGCTGGTGACTCTGCCTG | 94 | 151389 | 151408 | 778 |
| 533272 | GGCTGCTGGTGACTCTGCCT | 77 | 151390 | 151409 | 779 |
| 533273 | TGGCTGCTGGTGACTCTGCC | 82 | 151391 | 151410 | 780 |
| 533274 | GCTGAAGGATGGGCATCCAG | 85 | 152201 | 152220 | 781 |
| 533275 | TGCTGAAGGATGGGCATCCA | 85 | 152202 | 152221 | 782 |
| 533276 | ATGCTGAAGGATGGGCATCC | 78 | 152203 | 152222 | 783 |
| 533277 | GAATGCTGAAGGATGGGCAT | 66 | 152205 | 152224 | 784 |
| 533278 | AGAATGCTGAAGGATGGGCA | 81 | 152206 | 152225 | 785 |
| 533279 | CAGAATGCTGAAGGATGGGC | 85 | 152207 | 152226 | 786 |
| 533280 | TCCAGTAGTCAATATTATTT | 87 | 153001 | 153020 | 787 |
| 533281 | ATCCAGTAGTCAATATTATT | 85 | 153002 | 153021 | 788 |
| 533282 | TATCCAGTAGTCAATATTAT | 69 | 153003 | 153022 | 789 |
| 533283 | GTTATCCAGTAGTCAATATT | 77 | 153005 | 153024 | 790 |
| 533284 | GGTTATCCAGTAGTCAATAT | 85 | 153006 | 153025 | 791 |
| 533285 | TGGTTATCCAGTAGTCAATA | 86 | 153007 | 153026 | 792 |
| 533286 | CAACTTGAGGACAATAAGAG | 35 | 155591 | 155610 | 793 |
| 533287 | TCAACTTGAGGACAATAAGA | 62 | 155592 | 155611 | 794 |
| 533288 | CTCAACTTGAGGACAATAAG | 86 | 155593 | 155612 | 795 |
| 533289 | AACTCAACTTGAGGACAATA | 82 | 155595 | 155614 | 796 |
| 533290 | TAACTCAACTTGAGGACAAT | 66 | 155596 | 155615 | 797 |
| 533291 | ATAACTCAACTTGAGGACAA | 87 | 155597 | 155616 | 798 |
| 533292 | CAGGAAGAAAGGAACCTTAG | 77 | 156391 | 156410 | 799 |
| 533293 | CCAGGAAGAAAGGAACCTTA | 84 | 156392 | 156411 | 800 |
| 533294 | ACCAGGAAGAAAGGAACCTT | 86 | 156393 | 156412 | 801 |
| 533295 | AGACCAGGAAGAAAGGAACC | 74 | 156395 | 156414 | 802 |
| 533296 | TAGACCAGGAAGAAAGGAAC | 59 | 156396 | 156415 | 803 |
| 533297 | ATAGACCAGGAAGAAAGGAA | 65 | 156397 | 156416 | 804 |
| 533298 | TACAATGCACAGGACACGCC | 73 | 157198 | 157217 | 805 |
| 533299 | CTACAATGCACAGGACACGC | 85 | 157199 | 157218 | 806 |
| 533300 | GCTACAATGCACAGGACACG | 83 | 157200 | 157219 | 807 |
| 533301 | ATGCTACAATGCACAGGACA | 89 | 157202 | 157221 | 808 |
| 533302 | TATGCTACAATGCACAGGAC | 82 | 157203 | 157222 | 809 |
| 533303 | ATATGCTACAATGCACAGGA | 84 | 157204 | 157223 | 810 |
| 533304 | CTGATATTTATTGCTGTACG | 76 | 158006 | 158025 | 811 |
| 533305 | CTCTGATATTTATTGCTGTA | 80 | 158008 | 158027 | 812 |
| 533306 | TCTCTGATATTTATTGCTGT | 86 | 158009 | 158028 | 813 |
| 533307 | GTCTCTGATATTTATTGCTG | 80 | 158010 | 158029 | 814 |
| 533308 | CCAGAAGAATTACCCATGCA | 85 | 165550 | 165569 | 815 |
| 533309 | TCCAGAAGAATTACCCATGC | 84 | 165551 | 165570 | 816 |
| 533310 | TTCCAGAAGAATTACCCATG | 81 | 165552 | 165571 | 817 |
| 533311 | TCTTCCAGAAGAATTACCCA | 58 | 165554 | 165573 | 818 |
| 533312 | ATCTTCCAGAAGAATTACCC | 64 | 165555 | 165574 | 819 |
| 533313 | CATCTTCCAGAAGAATTACC | 58 | 165556 | 165575 | 820 |
| 533314 | TTTCTGCAGTATCCTAGCCT | 78 | 166350 | 166369 | 821 |
| 533315 | GTTTCTGCAGTATCCTAGCC | 88 | 166351 | 166370 | 822 |
| 533316 | AGTTTCTGCAGTATCCTAGC | 86 | 166352 | 166371 | 823 |
| 533317 | TCAGTTTCTGCAGTATCCTA | 88 | 166354 | 166373 | 824 |
| 533318 | TTCAGTTTCTGCAGTATCCT | 87 | 166355 | 166374 | 825 |
| 533319 | TTTCAGTTTCTGCAGTATCC | 80 | 166356 | 166375 | 826 |
| 533320 | GTTTCCATTTTCTTGATTCC | 70 | 169601 | 169620 | 827 |
| 533321 | TGTTTCCATTTTCTTGATTC | 54 | 169602 | 169621 | 828 |
| 533322 | GTGTTTCCATTTTCTTGATT | 55 | 169603 | 169622 | 829 |
| 533323 | TGGTGTTTCCATTTTCTTGA | 73 | 169605 | 169624 | 830 |
| 533324 | ATGGTGTTTCCATTTTCTTG | 76 | 169606 | 169625 | 831 |
| 533325 | AATGGTGTTTCCATTTTCTT | 78 | 169607 | 169626 | 832 |

TABLE 134
Inhibition of GHR mRNA by 5-10-5 MOE gapmers targeting
introns 2 and 3 of SEQ ID NO: 2

| | | | | SEQ | SEQ | |
|---|---|---|---|---|---|---|
| | | | | ID | ID | |
| | | | | NO: 2 | NO: 2 | |
| ISIS | | Target | % | Start | Stop | SEQ ID |
| NO | Sequence | region | inhibition | Site | Site | NO |
| 533326 | AACCCATTTCATCCATTTAA | Intron 2 | 93 | 175369 | 175388 | 833 |
| 533327 | GAACCCATTTCATCCATTTA | Intron 2 | 83 | 175370 | 175389 | 834 |
| 533328 | GGAACCCATTTCATCCATTT | Intron 2 | 92 | 175371 | 175390 | 835 |
| 533329 | TAGGAACCCATTTCATCCAT | Intron 2 | 91 | 175373 | 175392 | 836 |
| 533330 | GTAGGAACCCATTTCATCCA | Intron 2 | 95 | 175374 | 175393 | 837 |
| 533331 | GGTAGGAACCCATTTCATCC | Intron 2 | 92 | 175375 | 175394 | 838 |
| 533332 | TGAGGGATTGCCTCAGTAGC | Intron 2 | 66 | 179616 | 179635 | 839 |
| 533333 | TTGAGGGATTGCCTCAGTAG | Intron 2 | 72 | 179617 | 179636 | 840 |
| 533334 | TTTGAGGGATTGCCTCAGTA | Intron 2 | 67 | 179618 | 179637 | 841 |
| 533335 | CCTTTGAGGGATTGCCTCAG | Intron 2 | 74 | 179620 | 179639 | 842 |
| 533336 | TCCTTTGAGGGATTGCCTCA | Intron 2 | 66 | 179621 | 179640 | 843 |
| 533337 | CTCCTTTGAGGGATTGCCTC | Intron 2 | 76 | 179622 | 179641 | 844 |
| 533338 | AACTTAGGACTTGGGACATT | Intron 2 | 64 | 184575 | 184594 | 845 |
| 533339 | TAACTTAGGACTTGGGACAT | Intron 2 | 54 | 184576 | 184595 | 846 |
| 533340 | CTAACTTAGGACTTGGGACA | Intron 2 | 63 | 184577 | 184596 | 847 |
| 533341 | CACTAACTTAGGACTTGGGA | Intron 2 | 82 | 184579 | 184598 | 848 |
| 533342 | TCACTAACTTAGGACTTGGG | Intron 2 | 77 | 184580 | 184599 | 849 |
| 533343 | GTCACTAACTTAGGACTTGG | Intron 2 | 83 | 184581 | 184600 | 850 |
| 533344 | TGGGCTAGATCAGGATTGGT | Intron 2 | 81 | 188617 | 188636 | 851 |
| 533345 | ATGGGCTAGATCAGGATTGG | Intron 2 | 70 | 188618 | 188637 | 852 |
| 533346 | CATGGGCTAGATCAGGATTG | Intron 2 | 64 | 188619 | 188638 | 853 |
| 533347 | ACCATGGGCTAGATCAGGAT | Intron 2 | 82 | 188621 | 188640 | 854 |
| 533348 | TACCATGGGCTAGATCAGGA | Intron 2 | 88 | 188622 | 188641 | 855 |
| 533349 | CTACCATGGGCTAGATCAGG | Intron 2 | 87 | 188623 | 188642 | 856 |
| 533350 | ATGAGCTTAGCAGTCACTTA | Intron 2 | 83 | 189482 | 189501 | 857 |
| 533351 | CATGAGCTTAGCAGTCACTT | Intron 2 | 87 | 189483 | 189502 | 858 |
| 533352 | CCATGAGCTTAGCAGTCACT | Intron 2 | 92 | 189484 | 189503 | 859 |
| 533353 | GTCTCAGCAAACCTGGGATA | Intron 2 | 84 | 190283 | 190302 | 860 |
| 533354 | TGTCTCAGCAAACCTGGGAT | Intron 2 | 82 | 190284 | 190303 | 861 |
| 533355 | ATGTCTCAGCAAACCTGGGA | Intron 2 | 81 | 190285 | 190304 | 862 |
| 533356 | GAATGTCTCAGCAAACCTGG | Intron 2 | 76 | 190287 | 190306 | 863 |
| 533357 | GGAATGTCTCAGCAAACCTG | Intron 2 | 82 | 190288 | 190307 | 864 |
| 533358 | AGGAATGTCTCAGCAAACCT | Intron 2 | 85 | 190289 | 190308 | 865 |
| 533359 | TACAGACATAGCTCTAACCT | Intron 2 | 79 | 191139 | 191158 | 866 |
| 533360 | ATACAGACATAGCTCTAACC | Intron 2 | 79 | 191140 | 191159 | 867 |
| 533361 | GATACAGACATAGCTCTAAC | Intron 2 | 71 | 191141 | 191160 | 868 |
| 533362 | TGGATACAGACATAGCTCTA | Intron 2 | 79 | 191143 | 191162 | 869 |
| 533363 | CTGGATACAGACATAGCTCT | Intron 2 | 82 | 191144 | 191163 | 870 |
| 533364 | GCTGGATACAGACATAGCTC | Intron 2 | 95 | 191145 | 191164 | 871 |
| 533365 | ACACTGTTTGTGAGGGTCAA | Intron 2 | 87 | 191939 | 191958 | 872 |
| 533366 | AACACTGTTTGTGAGGGTCA | Intron 2 | 81 | 191940 | 191959 | 873 |
| 533367 | CAACACTGTTTGTGAGGGTC | Intron 2 | 85 | 191941 | 191960 | 874 |
| 533368 | AACAACACTGTTTGTGAGGG | Intron 2 | 65 | 191943 | 191962 | 875 |
| 533369 | AAACAACACTGTTTGTGAGG | Intron 2 | 76 | 191944 | 191963 | 876 |
| 533370 | CAAACAACACTGTTTGTGAG | Intron 2 | 67 | 191945 | 191964 | 877 |
| 533371 | TTCAAGTTTAGGATCTGCAG | Intron 2 | 73 | 196536 | 196555 | 878 |
| 533372 | CTTCAAGTTTAGGATCTGCA | Intron 2 | 88 | 196537 | 196556 | 879 |
| 533373 | GCTTCAAGTTTAGGATCTGC | Intron 2 | 86 | 196538 | 196557 | 880 |
| 533374 | GGGCTTCAAGTTTAGGATCT | Intron 2 | 67 | 196540 | 196559 | 881 |
| 533375 | AGGGCTTCAAGTTTAGGATC | Intron 2 | 66 | 196541 | 196560 | 882 |
| 533376 | CAGGGCTTCAAGTTTAGGAT | Intron 2 | 74 | 196542 | 196561 | 883 |
| 533377 | TGTGGCTTTAATTCACTAAT | Intron 2 | 84 | 198145 | 198164 | 884 |
| 533378 | ATGTGGCTTTAATTCACTAA | Intron 2 | 86 | 198146 | 198165 | 885 |
| 533379 | TATGTGGCTTTAATTCACTA | Intron 2 | 79 | 198147 | 198166 | 886 |
| 533380 | GGTATGTGGCTTTAATTCAC | Intron 2 | 83 | 198149 | 198168 | 887 |
| 533381 | TGGTATGTGGCTTTAATTCA | Intron 2 | 81 | 198150 | 198169 | 888 |
| 533382 | GTGGTATGTGGCTTTAATTC | Intron 2 | 86 | 198151 | 198170 | 889 |
| 533383 | TCTGTGTTCAGTTGCATCAC | Intron 2 | 75 | 199817 | 199836 | 890 |
| 533384 | TTCTGTGTTCAGTTGCATCA | Intron 2 | 82 | 199818 | 199837 | 891 |
| 533385 | GTTCTGTGTTCAGTTGCATC | Intron 2 | 86 | 199819 | 199838 | 892 |
| 533386 | GTACTCATGAGGAGGCACTT | Intron 2 | 81 | 201413 | 201432 | 893 |
| 533387 | GGTACTCATGAGGAGGCACT | Intron 2 | 82 | 201414 | 201433 | 894 |
| 533388 | TGGTACTCATGAGGAGGCAC | Intron 2 | 78 | 201415 | 201434 | 895 |
| 533389 | ATTGGTACTCATGAGGAGGC | Intron 2 | 64 | 201417 | 201436 | 896 |
| 533390 | AATTGGTACTCATGAGGAGG | Intron 2 | 47 | 201418 | 201437 | 897 |
| 533391 | CAATTGGTACTCATGAGGAG | Intron 2 | 54 | 201419 | 201438 | 898 |
| 533392 | AAACTCTGCAACTCCAACCC | Intron 2 | 69 | 205549 | 205568 | 899 |
| 533393 | GAAACTCTGCAACTCCAACC | Intron 2 | 64 | 205550 | 205569 | 900 |
| 533394 | GGAAACTCTGCAACTCCAAC | Intron 2 | 83 | 205551 | 205570 | 901 |
| 533395 | ATGGAAACTCTGCAACTCCA | Intron 2 | 88 | 205553 | 205572 | 902 |
| 533396 | CATGGAAACTCTGCAACTCC | Intron 2 | 70 | 205554 | 205573 | 903 |
| 533397 | TCATGGAAACTCTGCAACTC | Intron 2 | 69 | 205555 | 205574 | 904 |
| 533398 | ACATCTGGATGTGAGGCTCG | Intron 3 | 64 | 210559 | 210578 | 905 |
| 533399 | CACATCTGGATGTGAGGCTC | Intron 3 | 84 | 210560 | 210579 | 906 |
| 533400 | GTCACATCTGGATGTGAGGC | Intron 3 | 75 | 210562 | 210581 | 907 |
| 533401 | TGTCACATCTGGATGTGAGG | Intron 3 | 51 | 210563 | 210582 | 908 |
| 533402 | CTGTCACATCTGGATGTGAG | Intron 3 | 30 | 210564 | 210583 | 909 |

TABLE 135
Inhibition of GHR mRNA by 5-10-5 MOE gapmers targeting
introns 2 and 3 of SEQ ID NO: 2

| | | | | SEQ | | |
|---|---|---|---|---|---|---|
| | | | | ID | SEQ ID | |
| | | | | NO: 2 | NO: 2 | SEQ |
| ISIS | | Target | % | Start | Stop | ID |
| NO | Sequence | region | inhibition | Site | Site | NO |
| 523715 | GTCAATTATGTGCTTTGCCT | Intron 2 | 91 | 148907 | 148926 | 910 |
| 523716 | ACATTCAAAATTCTTCCTTG | Intron 2 | 50 | 149787 | 149806 | 911 |
| 523717 | ATCCTGCATATATTTTATTG | Intron 2 | 20 | 150588 | 150607 | 912 |
| 523718 | CTGCTGGTGACTCTGCCTGA | Intron 2 | 77 | 151388 | 151407 | 913 |
| 523719 | AATGCTGAAGGATGGGCATC | Intron 2 | 66 | 152204 | 152223 | 914 |
| 523720 | TTATCCAGTAGTCAATATTA | Intron 2 | 71 | 153004 | 153023 | 915 |
| 523721 | TCTCATGTTAAAGTTCTTAA | Intron 2 | 48 | 153831 | 153850 | 916 |
| 523722 | TGCACTTGGACAACTGATAG | Intron 2 | 29 | 154724 | 154743 | 917 |
| 523723 | ACTCAACTTGAGGACAATAA | Intron 2 | 88 | 155594 | 155613 | 918 |
| 523724 | GACCAGGAAGAAAGGAACCT | Intron 2 | 72 | 156394 | 156413 | 919 |
| 523725 | TGCTACAATGCACAGGACAC | Intron 2 | 80 | 157201 | 157220 | 920 |
| 523726 | TCTGATATTTATTGCTGTAC | Intron 2 | 73 | 158007 | 158026 | 921 |
| 523727 | ATGCTTCCTTTAATAAATGT | Intron 2 | 0 | 158807 | 158826 | 922 |
| 523728 | AACATTTAGAACCTAGGAGA | Intron 2 | 20 | 159610 | 159629 | 923 |
| 523729 | CAAGCTTGCAAGTAGGAAAA | Intron 2 | 51 | 160410 | 160429 | 924 |
| 523730 | CCAGGCTGTTCATGCCAAGG | Intron 2 | 26 | 161248 | 161267 | 925 |
| 523731 | CCTGCCAAGGGCAAGCCAGG | Intron 2 | 17 | 162064 | 162083 | 926 |
| 523732 | TTTCACCTGGTGACTGGAAG | Intron 2 | 51 | 163019 | 163038 | 927 |
| 523733 | ATTTTCTACCATCAAAGAGA | Intron 2 | 4 | 163943 | 163962 | 928 |
| 523734 | GATTAAGTTTTCTTTAAAAA | Intron 2 | 0 | 164746 | 164765 | 929 |
| 523735 | CTTCCAGAAGAATTACCCAT | Intron 2 | 56 | 165553 | 165572 | 930 |
| 523736 | CAGTTTCTGCAGTATCCTAG | Intron 2 | 77 | 166353 | 166372 | 931 |
| 523737 | TATTTTGAAAATGAGATTCA | Intron 2 | 0 | 167195 | 167214 | 932 |
| 523738 | GTGGCCCGAGTAAAGATAAA | Intron 2 | 21 | 167995 | 168014 | 933 |
| 523739 | CCTGTCAATCCTCTTATATG | Intron 2 | 37 | 168804 | 168823 | 934 |
| 523740 | GGTGTTTCCATTTTCTTGAT | Intron 2 | 65 | 169604 | 169623 | 935 |
| 523741 | ACAGGGTCAAAAGTTCACTT | Intron 2 | 44 | 170407 | 170426 | 936 |
| 523742 | TAGGAAAGCTGAGAGAATCC | Intron 2 | 35 | 171207 | 171226 | 937 |
| 523743 | AGCATATGAAAAAATACTCA | Intron 2 | 0 | 172101 | 172120 | 938 |
| 523744 | CTTCAGAAATCAGCATCTGA | Intron 2 | 45 | 172937 | 172956 | 939 |
| 523745 | TTACAAGTGACAGTGTTTGT | Intron 2 | 28 | 173737 | 173756 | 940 |
| 523746 | ATCAGACCCTGAAGAATTTA | Intron 2 | 29 | 174560 | 174579 | 941 |
| 523747 | AGGAACCCATTTCATCCATT | Intron 2 | 83 | 175372 | 175391 | 942 |
| 523748 | CACATTGGTAACTTAAAGTT | Intron 2 | 18 | 176263 | 176282 | 943 |
| 523749 | TATTATCTGACTCATTTCTG | Intron 2 | 16 | 177072 | 177091 | 944 |
| 523750 | AAATAAGACAAAGAAAATTC | Intron 2 | 0 | 177872 | 177891 | 945 |
| 523751 | TTTTAAAAATAACCAATTCA | Intron 2 | 0 | 178788 | 178807 | 946 |
| 523752 | CTTTGAGGGATTGCCTCAGT | Intron 2 | 66 | 179619 | 179638 | 947 |
| 523753 | ACAGTCCTCATGAACAGATT | Intron 2 | 37 | 180513 | 180532 | 948 |
| 523754 | ACTATCATTAATAATATTGT | Intron 2 | 0 | 181323 | 181342 | 949 |
| 523755 | ATCTAGATTTGCCTTATAAG | Intron 2 | 27 | 182123 | 182142 | 950 |
| 523756 | TGGTTGAGGAAGACAGTCTC | Intron 2 | 16 | 182962 | 182981 | 951 |
| 523757 | TGGCTCATAACTTCCTTAGC | Intron 2 | 43 | 183762 | 183781 | 952 |
| 523758 | ACTAACTTAGGACTTGGGAC | Intron 2 | 72 | 184578 | 184597 | 953 |
| 523759 | CTTATAGCATTACTAAGTGG | Intron 2 | 49 | 185403 | 185422 | 954 |
| 523760 | TGGTGGCAGGAGAGAGGGAA | Intron 2 | 48 | 186203 | 186222 | 955 |
| 523761 | TTTGCCAGGAAATCTTGAAA | Intron 2 | 35 | 187003 | 187022 | 956 |
| 523762 | ATAACTTTTCTCTGAAATTT | Intron 2 | 8 | 187803 | 187822 | 957 |
| 523763 | CCATGGGCTAGATCAGGATT | Intron 2 | 59 | 188620 | 188639 | 958 |
| 523764 | TGAGCTTAGCAGTCACTTAG | Intron 2 | 62 | 189481 | 189500 | 959 |
| 523765 | AATGTCTCAGCAAACCTGGG | Intron 2 | 62 | 190286 | 190305 | 960 |
| 523766 | GGATACAGACATAGCTCTAA | Intron 2 | 75 | 191142 | 191161 | 961 |
| 523767 | ACAACACTGTTTGTGAGGGT | Intron 2 | 66 | 191942 | 191961 | 962 |
| 523768 | TCTATTTTCTAATAGCTGTT | Intron 2 | 49 | 192742 | 192761 | 963 |
| 523769 | GGCCCCACCTCTGACCTTCA | Intron 2 | 7 | 193542 | 193561 | 964 |
| 523770 | TGGTAAAGCTAGAAAAAAAA | Intron 2 | 0 | 194346 | 194365 | 965 |
| 523771 | AAGTGGTAAATATGATCACA | Intron 2 | 23 | 195159 | 195178 | 966 |
| 523772 | GGCTTCAAGTTTAGGATCTG | Intron 2 | 52 | 196539 | 196558 | 967 |
| 523773 | TTGTTGACACTCTCTTTTGG | Intron 2 | 18 | 197348 | 197367 | 968 |
| 523774 | GTATGTGGCTTTAATTCACT | Intron 2 | 71 | 198148 | 198167 | 969 |
| 523775 | AATTAGTTGTTTTGGCAAAT | Intron 2 | 14 | 198988 | 199007 | 970 |
| 523776 | CTGTGTTCAGTTGCATCACG | Intron 2 | 75 | 199816 | 199835 | 971 |
| 523777 | AATGTGGAAGTTTCCTAACA | Intron 2 | 15 | 200616 | 200635 | 972 |
| 523778 | TTGGTACTCATGAGGAGGCA | Intron 2 | 58 | 201416 | 201435 | 973 |
| 523779 | TTTCTCTGTGTTTAAAATTG | Intron 2 | 13 | 202308 | 202327 | 974 |
| 523780 | GTAAAGCACAATGAACAAAA | Intron 2 | 21 | 203115 | 203134 | 975 |
| 523781 | ATCACAGATCTTTGCTACAA | Intron 2 | 51 | 203915 | 203934 | 976 |
| 523782 | TCCTGCCTTTCTGAACCAAA | Intron 2 | 50 | 204721 | 204740 | 977 |
| 523783 | TGGAAACTCTGCAACTCCAA | Intron 2 | 58 | 205552 | 205571 | 978 |
| 523784 | ACACAGTAGGGAACAATTTT | Intron 2 | 8 | 206412 | 206431 | 979 |
| 523785 | AGACAGATGGTGAAATGATG | Intron 2 | 0 | 207219 | 207238 | 980 |
| 523786 | AAACAGAAAGAGAAGAAAAC | Intron 2 | 0 | 208117 | 208136 | 981 |
| 523787 | CTTAGATAAATACTTCAAGA | Intron 3 | 0 | 208938 | 208957 | 982 |
| 523788 | AGCCACTTCTTTTACAACCT | Intron 3 | 0 | 209742 | 209761 | 983 |
| 523789 | TCACATCTGGATGTGAGGCT | Intron 3 | 80 | 210561 | 210580 | 984 |
| 523790 | GACTGAAACTTAAAGGTGGG | Intron 3 | 7 | 211399 | 211418 | 985 |
| 523791 | AAAGATGTGCAATCATCTAA | Intron 3 | 44 | 212204 | 212223 | 986 |

TABLE 136
Inhibition of GHR mRNA by 3-10-4 MOE gapmers targeting introns
2 and 3 of SEQ ID NO: 2

| | | | | SEQ | SEQ | |
|---|---|---|---|---|---|---|
| | | | | ID NO: | ID NO: | SEQ |
| ISIS | | Target | % | 2 Start | 2 Stop | ID |
| NO | Sequence | region | inhibition | Site | Site | NO |
| 539360 | GCTGGTGACTCTGCCTG | Intron 2 | 95 | 151389 | 151405 | 987 |
| 539361 | TGCTGGTGACTCTGCCT | Intron 2 | 95 | 151390 | 151406 | 988 |
| 539362 | CTGCTGGTGACTCTGCC | Intron 2 | 93 | 151391 | 151407 | 989 |
| 539363 | AGTAGTCAATATTATTT | Intron 2 | 31 | 153001 | 153017 | 990 |
| 539364 | CAGTAGTCAATATTATT | Intron 2 | 13 | 153002 | 153018 | 991 |
| 539365 | CCAGTAGTCAATATTAT | Intron 2 | 34 | 153003 | 153019 | 992 |
| 539366 | CCTTTGGGTGAATAGCA | Intron 2 | 64 | 153921 | 153937 | 993 |
| 539367 | ACCTTTGGGTGAATAGC | Intron 2 | 78 | 153922 | 153938 | 994 |
| 539368 | CACCTTTGGGTGAATAG | Intron 2 | 40 | 153923 | 153939 | 995 |
| 539369 | CAACTTGAGGACAATAA | Intron 2 | 38 | 155594 | 155610 | 996 |
| 539370 | TCAACTTGAGGACAATA | Intron 2 | 63 | 155595 | 155611 | 997 |
| 539371 | CTCAACTTGAGGACAAT | Intron 2 | 81 | 155596 | 155612 | 998 |
| 539372 | CAGGAAGAAAGGAACCT | Intron 2 | 70 | 156394 | 156410 | 999 |
| 539373 | CCAGGAAGAAAGGAACC | Intron 2 | 59 | 156395 | 156411 | 1000 |
| 539374 | ACCAGGAAGAAAGGAAC | Intron 2 | 43 | 156396 | 156412 | 1001 |
| 539375 | TGCAGTCATGTACACAA | Intron 2 | 93 | 156594 | 156610 | 1002 |
| 539376 | CTGCAGTCATGTACACA | Intron 2 | 91 | 156595 | 156611 | 1003 |
| 539377 | TCTGCAGTCATGTACAC | Intron 2 | 87 | 156596 | 156612 | 1004 |
| 539378 | TGGTTTGTCAATCCTTT | Intron 2 | 95 | 156889 | 156905 | 1005 |
| 539379 | TTGGTTTGTCAATCCTT | Intron 2 | 97 | 156890 | 156906 | 1006 |
| 539380 | CTTGGTTTGTCAATCCT | Intron 2 | 97 | 156891 | 156907 | 1007 |
| 539381 | TACAATGCACAGGACAC | Intron 2 | 65 | 157201 | 157217 | 1008 |
| 539382 | CTACAATGCACAGGACA | Intron 2 | 85 | 157202 | 157218 | 1009 |
| 539383 | GCTACAATGCACAGGAC | Intron 2 | 96 | 157203 | 157219 | 1010 |
| 539384 | GATATTTATTGCTGTAC | Intron 2 | 43 | 158007 | 158023 | 1011 |
| 539385 | TGATATTTATTGCTGTA | Intron 2 | 35 | 158008 | 158024 | 1012 |
| 539386 | CTGATATTTATTGCTGT | Intron 2 | 38 | 158009 | 158025 | 1013 |
| 539387 | AGGGTCTTTACAAAGTT | Intron 2 | 61 | 162751 | 162767 | 1014 |
| 539388 | CAGGGTCTTTACAAAGT | Intron 2 | 65 | 162752 | 162768 | 1015 |
| 539389 | CCAGGGTCTTTACAAAG | Intron 2 | 88 | 162753 | 162769 | 1016 |
| 539390 | TTCTGCAGTATCCTAGC | Intron 2 | 72 | 166352 | 166368 | 1017 |
| 539391 | TTTCTGCAGTATCCTAG | Intron 2 | 53 | 166353 | 166369 | 1018 |
| 539392 | GTTTCTGCAGTATCCTA | Intron 2 | 84 | 166354 | 166370 | 1019 |
| 539393 | AGTTTCTGCAGTATCCT | Intron 2 | 78 | 166355 | 166371 | 1020 |
| 539394 | CAGTTTCTGCAGTATCC | Intron 2 | 77 | 166356 | 166372 | 1021 |
| 539395 | CAAATTCCAGTCCTAGG | Intron 2 | 60 | 172746 | 172762 | 1022 |
| 539396 | CCAAATTCCAGTCCTAG | Intron 2 | 75 | 172747 | 172763 | 1023 |
| 539397 | TCCAAATTCCAGTCCTA | Intron 2 | 62 | 172748 | 172764 | 1024 |
| 539398 | AACCCATTTCATCCATT | Intron 2 | 82 | 175372 | 175388 | 1025 |
| 539399 | GAACCCATTTCATCCAT | Intron 2 | 86 | 175373 | 175389 | 1026 |
| 539400 | GGAACCCATTTCATCCA | Intron 2 | 84 | 175374 | 175390 | 1027 |
| 539401 | GCTTCATGTCTTTCTAG | Intron 2 | 88 | 189119 | 189135 | 1028 |
| 539402 | TGCTTCATGTCTTTCTA | Intron 2 | 77 | 189120 | 189136 | 1029 |
| 539403 | GTGCTTCATGTCTTTCT | Intron 2 | 95 | 189121 | 189137 | 1030 |
| 539404 | TGAGCTTAGCAGTCACT | Intron 2 | 92 | 189484 | 189500 | 1031 |
| 539405 | CATGAGCTTAGCAGTCA | Intron 2 | 82 | 189486 | 189502 | 1032 |
| 539406 | TACAGACATAGCTCTAA | Intron 2 | 45 | 191142 | 191158 | 1033 |
| 539407 | ATACAGACATAGCTCTA | Intron 2 | 53 | 191143 | 191159 | 1034 |
| 539408 | GATACAGACATAGCTCT | Intron 2 | 67 | 191144 | 191160 | 1035 |
| 539409 | TGTGGCTTTAATTCACT | Intron 2 | 70 | 198148 | 198164 | 1036 |
| 539410 | ATGTGGCTTTAATTCAC | Intron 2 | 40 | 198149 | 198165 | 1037 |
| 539411 | TATGTGGCTTTAATTCA | Intron 2 | 35 | 198150 | 198166 | 1038 |
| 539412 | TGTTCAGTTGCATCACG | Intron 2 | 84 | 199816 | 199832 | 1039 |
| 539413 | GTGTTCAGTTGCATCAC | Intron 2 | 80 | 199817 | 199833 | 1040 |
| 539414 | TGTGTTCAGTTGCATCA | Intron 2 | 74 | 199818 | 199834 | 1041 |
| 539415 | CATCTGGATGTGAGGCT | Intron 3 | 82 | 210561 | 210577 | 1042 |
| 539416 | ACATCTGGATGTGAGGC | Intron 3 | 86 | 210562 | 210578 | 1043 |
| 539417 | CACATCTGGATGTGAGG | Intron 3 | 55 | 210563 | 210579 | 1044 |
| 539418 | TCAGGTAATTTCTGGAA | Intron 3 | 35 | 219019 | 219035 | 1045 |
| 539419 | CTCAGGTAATTTCTGGA | Intron 3 | 44 | 219020 | 219036 | 1046 |
| 539420 | TCTCAGGTAATTTCTGG | Intron 3 | 31 | 219021 | 219037 | 1047 |
| 539421 | TTGCTTATTTACCTGGG | Intron 3 | 0 | 225568 | 225584 | 1048 |
| 539422 | TTTGCTTATTTACCTGG | Intron 3 | 38 | 225569 | 225585 | 1049 |
| 539423 | TTTTGCTTATTTACCTG | Intron 3 | 33 | 225570 | 225586 | 1050 |
| 539424 | ATGATGTTACTACTACT | Intron 3 | 29 | 229618 | 229634 | 1051 |
| 539425 | AATGATGTTACTACTAC | Intron 3 | 10 | 229619 | 229635 | 1052 |
| 539426 | CAATGATGTTACTACTA | Intron 3 | 0 | 229620 | 229636 | 1053 |
| 539427 | CCCCTAGAGCAATGGTC | Intron 3 | 67 | 232826 | 232842 | 1054 |
| 539428 | CCCCCTAGAGCAATGGT | Intron 3 | 65 | 232827 | 232843 | 1055 |
| 539429 | TCCCCCTAGAGCAATGG | Intron 3 | 45 | 232828 | 232844 | 1056 |
| 539430 | TCAATTGCAGATGCTCT | Intron 3 | 78 | 237675 | 237691 | 1057 |
| 539431 | CTCAATTGCAGATGCTC | Intron 3 | 82 | 237676 | 237692 | 1058 |
| 539432 | GCTCAATTGCAGATGCT | Intron 3 | 92 | 237677 | 237693 | 1059 |
| 539433 | AGCTCAATTGCAGATGC | Intron 3 | 85 | 237678 | 237694 | 1060 |
| 539434 | GTATATTCAGTCCAAGG | Intron 3 | 73 | 248231 | 248247 | 1061 |
| 539435 | AGTATATTCAGTCCAAG | Intron 3 | 70 | 248232 | 248248 | 1062 |
| 539436 | CAGTATATTCAGTCCAA | Intron 3 | 40 | 248233 | 248249 | 1063 |

TABLE 137
Inhibition of GHR mRNA by 5-10-5 MOE gapmers targeting
introns 1 and 3 of SEQ ID NO: 2

| | | | | SEQ | SEQ | |
|---|---|---|---|---|---|---|
| | | | | ID | ID | |
| | | | | NO: 2 | NO: 2 | |
| ISIS | | Target | % | Start | Stop | SEQ ID |
| NO | Sequence | region | inhibition | Site | Site | NO |
| 532502 | GAGTATTTCAGGCTGGAAAA | Intron 3 | 43 | 214623 | 214642 | 1064 |
| 533404 | GTAACTCAGGAATGGAAAAC | Intron 1 | 56 | 26501 | 26520 | 1065 |
| | | | | 113035 | 113054 | |
| | | | | 121992 | 122011 | |
| 533405 | AGTAACTCAGGAATGGAAAA | Intron 1 | 41 | 26502 | 26521 | 1066 |
| | | | | 113036 | 113055 | |
| | | | | 121993 | 122012 | |
| 533406 | AAGTAACTCAGGAATGGAAA | Intron 1 | 43 | 26503 | 26522 | 1067 |
| | | | | 113037 | 113056 | |
| | | | | 121994 | 122013 | |
| 533407 | GAGATTTCAAATAAATCTCA | Intron 1 | 0 | 143207 | 143226 | 1068 |
| | | | | 143235 | 143254 | |
| | | | | 143263 | 143282 | |
| | | | | 143291 | 143310 | |
| | | | | 143319 | 143338 | |
| | | | | 143347 | 143366 | |
| | | | | 143375 | 143394 | |
| | | | | 143403 | 143422 | |
| | | | | 143431 | 143450 | |
| | | | | 143459 | 143478 | |
| 533408 | TGAGATTTCAAATAAATCTC | Intron 1 | 11 | 143208 | 143227 | 1069 |
| | | | | 143236 | 143255 | |
| | | | | 143264 | 143283 | |
| | | | | 143292 | 143311 | |
| | | | | 143320 | 143339 | |
| | | | | 143348 | 143367 | |
| | | | | 143376 | 143395 | |
| | | | | 143404 | 143423 | |
| | | | | 143432 | 143451 | |
| | | | | 143460 | 143479 | |
| 533409 | GTGAGATTTCAAATAAATCT | Intron 1 | 0 | 143209 | 143228 | 1070 |
| | | | | 143237 | 143256 | |
| | | | | 143265 | 143284 | |
| | | | | 143293 | 143312 | |
| | | | | 143321 | 143340 | |
| | | | | 143349 | 143368 | |
| | | | | 143377 | 143396 | |
| | | | | 143405 | 143424 | |
| | | | | 143433 | 143452 | |
| | | | | 143461 | 143480 | |
| 533410 | TGTGAGATTTCAAATAAATC | Intron 1 | 0 | 143210 | 143229 | 1071 |
| | | | | 143238 | 143257 | |
| | | | | 143266 | 143285 | |
| | | | | 143294 | 143313 | |
| | | | | 143322 | 143341 | |
| | | | | 143350 | 143369 | |
| | | | | 143378 | 143397 | |
| | | | | 143406 | 143425 | |
| | | | | 143434 | 143453 | |
| | | | | 143462 | 143481 | |
| 533411 | TTGTGAGATTTCAAATAAAT | Intron 1 | 10 | 143183 | 143202 | 1072 |
| | | | | 143211 | 143230 | |
| | | | | 143239 | 143258 | |
| | | | | 143267 | 143286 | |
| | | | | 143295 | 143314 | |
| | | | | 143323 | 143342 | |
| | | | | 143351 | 143370 | |
| | | | | 143379 | 143398 | |
| | | | | 143407 | 143426 | |
| | | | | 143435 | 143454 | |
| | | | | 143463 | 143482 | |
| 533412 | TTTGTGAGATTTCAAATAAA | Intron 1 | 0 | 143184 | 143203 | 1073 |
| | | | | 143212 | 143231 | |
| | | | | 143240 | 143259 | |
| | | | | 143296 | 143315 | |
| | | | | 143324 | 143343 | |
| | | | | 143352 | 143371 | |
| | | | | 143380 | 143399 | |
| | | | | 143464 | 143483 | |
| 533413 | CTTTGTGAGATTTCAAATAA | Intron 1 | 20 | 143185 | 143204 | 1074 |
| | | | | 143213 | 143232 | |
| | | | | 143241 | 143260 | |
| | | | | 143297 | 143316 | |
| | | | | 143325 | 143344 | |
| | | | | 143353 | 143372 | |
| | | | | 143381 | 143400 | |
| | | | | 143465 | 143484 | |
| 533414 | ACTTTGTGAGATTTCAAATA | Intron 1 | 57 | 143186 | 143205 | 1075 |
| | | | | 143214 | 143233 | |
| | | | | 143242 | 143261 | |
| | | | | 143298 | 143317 | |
| | | | | 143326 | 143345 | |
| | | | | 143354 | 143373 | |
| | | | | 143382 | 143401 | |
| | | | | 143466 | 143485 | |
| 533415 | CACTTTGTGAGATTTCAAAT | Intron 1 | 69 | 143187 | 143206 | 1076 |
| | | | | 143215 | 143234 | |
| | | | | 143243 | 143262 | |
| | | | | 143299 | 143318 | |
| | | | | 143327 | 143346 | |
| | | | | 143355 | 143374 | |
| | | | | 143383 | 143402 | |
| | | | | 143467 | 143486 | |
| 533895 | AGTATTTCAGGCTGGAAAAA | Intron 3 | 35 | 214622 | 214641 | 1077 |
| 533896 | TGAGTATTTCAGGCTGGAAA | Intron 3 | 55 | 214624 | 214643 | 1078 |
| 533897 | TCTGAGTATTTCAGGCTGGA | Intron 3 | 71 | 214626 | 214645 | 1079 |
| 533898 | ATCTGAGTATTTCAGGCTGG | Intron 3 | 77 | 214627 | 214646 | 1080 |
| 533899 | TATCTGAGTATTTCAGGCTG | Intron 3 | 58 | 214628 | 214647 | 1081 |
| 533900 | TTTTGTGTTATGCCTTGAGG | Intron 3 | 51 | 221483 | 221502 | 1082 |
| 533901 | TTTTTGTGTTATGCCTTGAG | Intron 3 | 55 | 221484 | 221503 | 1083 |
| 533902 | ATTTTTGTGTTATGCCTTGA | Intron 3 | 57 | 221485 | 221504 | 1084 |
| 533903 | ATATTTTTGTGTTATGCCTT | Intron 3 | 56 | 221487 | 221506 | 1085 |
| 533904 | AATATTTTTGTGTTATGCCT | Intron 3 | 61 | 221488 | 221507 | 1086 |
| 533905 | AAATATTTTTGTGTTATGCC | Intron 3 | 18 | 221489 | 221508 | 1087 |
| 533906 | TTGCTTATTTACCTGGGTAA | Intron 3 | 58 | 225565 | 225584 | 1088 |
| 533907 | TTTGCTTATTTACCTGGGTA | Intron 3 | 64 | 225566 | 225585 | 1089 |
| 533908 | TTTTGCTTATTTACCTGGGT | Intron 3 | 77 | 225567 | 225586 | 1090 |
| 533909 | CCTTTTGCTTATTTACCTGG | Intron 3 | 69 | 225569 | 225588 | 1091 |
| 533910 | GCCTTTTGCTTATTTACCTG | Intron 3 | 69 | 225570 | 225589 | 1092 |
| 533911 | TGCCTTTTGCTTATTTACCT | Intron 3 | 55 | 225571 | 225590 | 1093 |
| 533912 | ATGATGTTACTACTACTCAA | Intron 3 | 60 | 229615 | 229634 | 1094 |
| 533913 | AATGATGTTACTACTACTCA | Intron 3 | 48 | 229616 | 229635 | 1095 |
| 533914 | CAATGATGTTACTACTACTC | Intron 3 | 57 | 229617 | 229636 | 1096 |
| 533915 | TCCAATGATGTTACTACTAC | Intron 3 | 69 | 229619 | 229638 | 1097 |
| 533916 | TTCCAATGATGTTACTACTA | Intron 3 | 74 | 229620 | 229639 | 1098 |
| 533917 | ATTCCAATGATGTTACTACT | Intron 3 | 74 | 229621 | 229640 | 1099 |
| 533918 | CCCCTAGAGCAATGGTCTAG | Intron 3 | 71 | 232823 | 232842 | 1100 |
| 533919 | CCCCCTAGAGCAATGGTCTA | Intron 3 | 44 | 232824 | 232843 | 1101 |
| 533920 | TCCCCCTAGAGCAATGGTCT | Intron 3 | 54 | 232825 | 232844 | 1102 |
| 533921 | TATCCCCCTAGAGCAATGGT | Intron 3 | 62 | 232827 | 232846 | 1103 |
| 533922 | ATATCCCCCTAGAGCAATGG | Intron 3 | 50 | 232828 | 232847 | 1104 |
| 533923 | AATATCCCCCTAGAGCAATG | Intron 3 | 61 | 232829 | 232848 | 1105 |
| 533924 | GCTCACATTTGGAAGACAGT | Intron 3 | 68 | 233623 | 233642 | 1106 |
| 533925 | GGCTCACATTTGGAAGACAG | Intron 3 | 74 | 233624 | 233643 | 1107 |
| 533926 | AGGCTCACATTTGGAAGACA | Intron 3 | 56 | 233625 | 233644 | 1108 |
| 533927 | AGAGGCTCACATTTGGAAGA | Intron 3 | 34 | 233627 | 233646 | 1109 |
| 533928 | TAGAGGCTCACATTTGGAAG | Intron 3 | 18 | 233628 | 233647 | 1110 |
| 533929 | TTAGAGGCTCACATTTGGAA | Intron 3 | 19 | 233629 | 233648 | 1111 |
| 533930 | CTCAATTGCAGATGCTCTGA | Intron 3 | 66 | 237673 | 237692 | 1112 |
| 533931 | GCTCAATTGCAGATGCTCTG | Intron 3 | 72 | 237674 | 237693 | 1113 |
| 533932 | AGCTCAATTGCAGATGCTCT | Intron 3 | 74 | 237675 | 237694 | 1114 |
| 533933 | AAAGCTCAATTGCAGATGCT | Intron 3 | 66 | 237677 | 237696 | 1115 |
| 533934 | TAAAGCTCAATTGCAGATGC | Intron 3 | 59 | 237678 | 237697 | 1116 |
| 533935 | ATAAAGCTCAATTGCAGATG | Intron 3 | 23 | 237679 | 237698 | 1117 |
| 533936 | GTGAGTCCATTAAACCTCTT | Intron 3 | 73 | 244873 | 244892 | 1118 |
| 533937 | TGTGAGTCCATTAAACCTCT | Intron 3 | 73 | 244874 | 244893 | 1119 |
| 533938 | ACTGTGAGTCCATTAAACCT | Intron 3 | 17 | 244876 | 244895 | 1120 |
| 533939 | AACTGTGAGTCCATTAAACC | Intron 3 | 19 | 244877 | 244896 | 1121 |
| 533940 | GAACTGTGAGTCCATTAAAC | Intron 3 | 28 | 244878 | 244897 | 1122 |
| 533941 | ATATTGAAAGGCCCATCAAA | Intron 3 | 13 | 246498 | 246517 | 1123 |
| 533942 | AATATTGAAAGGCCCATCAA | Intron 3 | 31 | 246499 | 246518 | 1124 |
| 533943 | AAATATTGAAAGGCCCATCA | Intron 3 | 51 | 246500 | 246519 | 1125 |
| 533944 | GAAAATATTGAAAGGCCCAT | Intron 3 | 22 | 246502 | 246521 | 1126 |
| 533945 | GGAAAATATTGAAAGGCCCA | Intron 3 | 42 | 246503 | 246522 | 1127 |
| 533946 | AGGAAAATATTGAAAGGCCC | Intron 3 | 28 | 246504 | 246523 | 1128 |
| 533947 | GTATATTCAGTCCAAGGATC | Intron 3 | 65 | 248228 | 248247 | 1129 |
| 533948 | AGTATATTCAGTCCAAGGAT | Intron 3 | 63 | 248229 | 248248 | 1130 |
| 533949 | CAGTATATTCAGTCCAAGGA | Intron 3 | 67 | 248230 | 248249 | 1131 |
| 533950 | AACAGTATATTCAGTCCAAG | Intron 3 | 56 | 248232 | 248251 | 1132 |
| 533951 | AAACAGTATATTCAGTCCAA | Intron 3 | 60 | 248233 | 248252 | 1133 |
| 533952 | AAAACAGTATATTCAGTCCA | Intron 3 | 59 | 248234 | 248253 | 1134 |
| 533953 | TCTATTGTTGCCACCTTTAT | Intron 3 | 45 | 252838 | 252857 | 1135 |
| 533954 | TTCTATTGTTGCCACCTTTA | Intron 3 | 52 | 252839 | 252858 | 1136 |
| 533955 | TTTCTATTGTTGCCACCTTT | Intron 3 | 46 | 252840 | 252859 | 1137 |
| 533956 | AGTTTCTATTGTTGCCACCT | Intron 3 | 59 | 252842 | 252861 | 1138 |
| 533957 | CAGTTTCTATTGTTGCCACC | Intron 3 | 41 | 252843 | 252862 | 1139 |
| 533958 | CCAGTTTCTATTGTTGCCAC | Intron 3 | 48 | 252844 | 252863 | 1140 |

TABLE 138
Inhibition of GHR mRNA by 5-10-5 MOE gapmers
targeting intron 3 of SEQ ID NO: 2

| | | | SEQ | SEQ | |
|---|---|---|---|---|---|
| | | | ID | ID | |
| | | | NO: 2 | NO: 2 | |
| | | % | Start | Stop | SEQ ID |
| ISIS NO | Sequence | inhibition | Site | Site | NO |
| 532454 | GCAGAACTGATTGCTTACTT | 78 | 182862 | 182881 | 1141 |
| 532455 | AGGTCATAAGATTTTCATTT | 48 | 183533 | 183552 | 1142 |
| 532456 | GCCTCTGGCCATAAAGAAAT | 54 | 183578 | 183597 | 1143 |
| 532457 | AAAGTTTAAGAGGCACCCCA | 31 | 184508 | 184527 | 1144 |
| 532458 | GAATAAGCACAAAAGTTTAA | 28 | 184519 | 184538 | 1145 |
| 532459 | GAACCAAATAAACCTCTCTT | 52 | 185452 | 185471 | 1146 |
| 532460 | ATGTTGAAATTTGATCCCCA | 79 | 185763 | 185782 | 1147 |
| 532461 | TGTGAGAGCTCACTCACTAT | 42 | 186134 | 186153 | 1148 |
| 532462 | CTTGTGAGAGCTCACTCACT | 72 | 186136 | 186155 | 1149 |
| 532463 | ACATGGTGGCAGGAGAGAGG | 42 | 186206 | 186225 | 1150 |
| 532464 | CTAGAAAGAAACTACCTGAG | 12 | 186341 | 186360 | 1151 |
| 532465 | AACTTCAGTTGTAAAATAAT | 27 | 187044 | 187063 | 1152 |
| 532466 | GAAAAGGATTTTGAGATTTC | 43 | 188897 | 188916 | 1153 |
| 532467 | CTTAGCTGTCAAGGCCCTTT | 80 | 189084 | 189103 | 1154 |
| 532468 | TGTGCTTCATGTCTTTCTAG | 88 | 189119 | 189138 | 1155 |
| 532469 | CCCTTGAACATGCTATCCTT | 85 | 189256 | 189275 | 1156 |
| 532470 | CTTGCAGGGATGCATCTCAG | 87 | 189625 | 189644 | 1157 |
| 532471 | TCTCTTGCACATCTAATTTC | 82 | 189656 | 189675 | 1158 |
| 532472 | CTTCCAGCACAACCCATCAC | 77 | 190109 | 190128 | 1159 |
| 532473 | GTAACTACATTCCCTTTATC | 52 | 190860 | 190879 | 1160 |
| 532474 | AGTAACTACATTCCCTTTAT | 58 | 190861 | 190880 | 1161 |
| 532475 | CAGATAGCACAGGGCTAAAA | 84 | 190979 | 190998 | 1162 |
| 532476 | AGAATCAGGAATGTTTGCCT | 86 | 192904 | 192923 | 1163 |
| 532477 | TGACTCAATCATTTAGACTT | 45 | 192990 | 193009 | 1164 |
| 532478 | TCAACAGTCAATGGACTTGT | 71 | 193042 | 193061 | 1165 |
| 532479 | AATTTCTACTGCTATGATGC | 75 | 194806 | 194825 | 1166 |
| 532480 | ATGGTTCCAAATTTCTATCT | 86 | 195704 | 195723 | 1167 |
| 532481 | CTGTATGGCTTTAAGTATTC | 63 | 196756 | 196775 | 1168 |
| 532482 | AACTTATGAACTGTTCACCA | 86 | 198307 | 198326 | 1169 |
| 532483 | AATAAGCTTGAAGTCTGAAG | 63 | 199520 | 199539 | 1170 |
| 532484 | TAGTTATCTAACTGCCCAAT | 77 | 199544 | 199563 | 1171 |
| 532485 | TTCTGCAAAGCTTCCCAGTA | 72 | 200314 | 200333 | 1172 |
| 532486 | ACAACTTCAAGCTTCACATA | 65 | 200599 | 200618 | 1173 |
| 532487 | GAATCAATGTTCTGGCAAGA | 52 | 201842 | 201861 | 1174 |
| 532488 | CAGCCTTTCAGCTGTGAAAG | 52 | 204181 | 204200 | 1175 |
| 532489 | AACAATGCCAAGAAATCTAT | 74 | 204369 | 204388 | 1176 |
| 532490 | CCCACAGTAACAATGCCAAG | 90 | 204377 | 204396 | 1177 |
| 532491 | TTTTACCTCCCAGTGAAACT | 34 | 205896 | 205915 | 1178 |
| 532492 | TAATTGTTGATCCATGATGT | 5 | 208856 | 208875 | 1179 |
| 532493 | GTTGGAGAGACAAGTTTAAC | 29 | 208975 | 208994 | 1180 |
| 532494 | AGTCATAAAATTCAAATTAT | 39 | 209537 | 209556 | 1181 |
| 532495 | GGCCTTGGGCACACTTTCTC | 82 | 207510 | 207529 | 1182 |
| | | | 210189 | 210208 | |
| 532496 | AAGTTTTTATTGAAGTTAAT | 0 | 212551 | 212570 | 1183 |
| 532497 | AAGAAAAATTAGGAAGCTAG | 31 | 212649 | 212668 | 1184 |
| 532498 | CAGGGAGATAAGTTTATTCA | 61 | 212797 | 212816 | 1185 |
| 532499 | ATTTAATACACATTGGAATA | 15 | 213390 | 213409 | 1186 |
| 532500 | GTAGGACTATTTATGATTCC | 86 | 213914 | 213933 | 1187 |
| 532501 | CACTCTCTTGGGCTGTTAAG | 82 | 214479 | 214498 | 1188 |
| 532502 | GAGTATTTCAGGCTGGAAAA | 66 | 214623 | 214642 | 1064 |
| 532503 | TTGTTTGAGTTCCAAAAGAA | 39 | 214932 | 214951 | 1189 |
| 532504 | TTTGCCATGAGACACACAAT | 77 | 215932 | 215951 | 1190 |
| 532505 | CACCAAACCTCAGAGACATG | 80 | 216468 | 216487 | 1191 |
| 532506 | CCACTGTTAAGTGATGCATG | 83 | 217480 | 217499 | 1192 |
| 532507 | CTCTCAGGTAATTTCTGGAA | 86 | 219019 | 219038 | 1193 |
| 532508 | GCTCCTCACAATGACCCTTT | 84 | 219452 | 219471 | 1194 |
| 532509 | GGGACTGGCACTGGTAATTT | 56 | 220062 | 220081 | 1195 |
| 532510 | CTAACCATTAGTTACTGTAT | 69 | 220558 | 220577 | 1196 |
| 532511 | GGATTTTAGGTTCTTGCTGT | 51 | 221588 | 221607 | 1197 |
| 532512 | TGAATCATATACTGATATCA | 63 | 222914 | 222933 | 1198 |
| 532513 | TTGAGGTATTAAATTTTAAA | 0 | 223001 | 223020 | 1199 |
| 532514 | AGTTTGTAATGTAGTGATTT | 19 | 223156 | 223175 | 1200 |
| 532515 | AAATATTTGATAGCTCACAT | 18 | 224409 | 224428 | 1201 |
| 532516 | AGAAATATTTGATAGCTCAC | 57 | 224411 | 224430 | 1202 |
| 532517 | CCACATTTCAAATGTTCTCT | 80 | 224717 | 224736 | 1203 |
| 532518 | GCAGGAAGAGTGGCATGGAC | 59 | 224750 | 224769 | 1204 |
| 532519 | CACTTATCCAAATGCAGAGA | 82 | 225742 | 225761 | 1205 |
| 532520 | CAAGGTAATGGGAGGCTAGC | 47 | 225903 | 225922 | 1206 |
| 532521 | ATAGTCAAAGCTAAGGATAT | 4 | 226177 | 226196 | 1207 |
| 532522 | GTAATTTCATTCATGCTTCC | 67 | 226804 | 226823 | 1208 |
| 532523 | GTCCACATTCAGCTGTGTGT | 72 | 231912 | 231931 | 1209 |
| 532524 | TCATTCAGGAAATTCTGCTA | 62 | 232286 | 232305 | 1210 |
| 532525 | AACATGTCTCATTCAGGAAA | 71 | 232294 | 232313 | 1211 |
| 532526 | TAACATGTCTCATTCAGGAA | 85 | 232295 | 232314 | 1212 |
| 532527 | AGATTCCTCAAATTCAGTGA | 66 | 232389 | 232408 | 1213 |
| 532528 | TAAGCGGAAAAGGAGAAAAG | 0 | 233684 | 233703 | 1214 |
| 532529 | AAAGCAAGAGAATTCCTAAA | 32 | 234203 | 234222 | 1215 |
| 532530 | AATGAACCTTTAACTTAGTA | 40 | 234876 | 234895 | 1216 |

TABLE 139
Inhibition of GHR mRNA by 5-10-5 MOE gapmers targeting introns 3-8 and
intron-exonic regions of SEQ ID NO: 2

| | | | | SEQ | SEQ | |
|---|---|---|---|---|---|---|
| | | | | ID NO: | ID NO: | SEQ |
| ISIS | | | % | 2 Start | 2 Stop | ID |
| NO | Sequence | Target region | inhibition | Site | Site | NO |
| 523792 | AAAGCTTTGTGGATAAAGTT | Intron 3 | 44 | 213025 | 213044 | 1217 |
| 523793 | GAAGGAAAGGTTCTGTGGAA | Intron 3 | 38 | 213825 | 213844 | 1218 |
| 523794 | CTGAGTATTTCAGGCTGGAA | Intron 3 | 84 | 214625 | 214644 | 1219 |
| 523795 | TTGAATTATCCCTTTAAAAA | Intron 3 | 38 | 215446 | 215465 | 1220 |
| 523796 | TTTAGAATGGTTTGGCATAC | Intron 3 | 66 | 216365 | 216384 | 1221 |
| 523797 | GATATGTCCACATTGATTAG | Intron 3 | 65 | 218132 | 218151 | 1222 |
| 523798 | ATTATTTAAGCTTCTACTTT | Intron 3 | 44 | 218973 | 218992 | 1223 |
| 523799 | ATACATGGCAATTAAAAGAT | Intron 3 | 26 | 219886 | 219905 | 1224 |
| 523800 | TGAGATAGTGTGGGAAATAT | Intron 3 | 18 | 220686 | 220705 | 1225 |
| 523801 | TATTTTTGTGTTATGCCTTG | Intron 3 | 73 | 221486 | 221505 | 1226 |
| 523802 | TTATTAACTAGAATATGCCT | Intron 3 | 16 | 223110 | 223129 | 1227 |
| 523803 | GATTATTCTATTTTTATTTT | Intron 3 | 33 | 223948 | 223967 | 1228 |
| 523804 | AGGAAGAGTGGCATGGACAT | Intron 3 | 43 | 224748 | 224767 | 1229 |
| 523805 | CTTTTGCTTATTTACCTGGG | Intron 3 | 84 | 225568 | 225587 | 1230 |
| 523806 | TTTATATTATTAATATCATT | Intron 3 | 31 | 226371 | 226390 | 1231 |
| 523807 | GGTACATGGCTTTTAAGTGG | Intron 3 | 53 | 227218 | 227237 | 1232 |
| 523808 | AATATTGGTCAGGTTTAAGA | Intron 3 | 28 | 228018 | 228037 | 1233 |
| 523809 | ATTTCATCTCTTTCTTAGTT | Intron 3 | 45 | 228818 | 228837 | 1234 |
| 523810 | CCAATGATGTTACTACTACT | Intron 3 | 89 | 229618 | 229637 | 1235 |
| 523811 | GTTCCCCCAACCCCTTGGAA | Intron 3 | 28 | 230418 | 230437 | 1236 |
| 523812 | TATAGGAAGTGAGATGTATG | Intron 3 | 46 | 231218 | 231237 | 1237 |
| 523813 | ATTATTCTAGAAGAAGATTT | Intron 3 | 12 | 232018 | 232037 | 1238 |
| 523814 | ATCCCCCTAGAGCAATGGTC | Intron 3 | 79 | 232826 | 232845 | 1239 |
| 523815 | GAGGCTCACATTTGGAAGAC | Intron 3 | 69 | 233626 | 233645 | 1240 |
| 523816 | TACACAAATCCAAGGCAGAG | Intron 3 | 57 | 234447 | 234466 | 1241 |
| 523817 | AGGAAGAGTGGGAGTGTTAC | Intron 3 | 35 | 235258 | 235277 | 1242 |
| 523818 | GTCCCTGACTAGGCATTTTG | Intron 3 | 43 | 236071 | 236090 | 1243 |
| 523819 | AAGCTCAATTGCAGATGCTC | Intron 3 | 80 | 237676 | 237695 | 1244 |
| 523820 | CTGTGAGTCCATTAAACCTC | Intron 3 | 81 | 244875 | 244894 | 1245 |
| 523821 | TGAAATGTGGCTAGTGTGAC | Intron 3 | 51 | 245701 | 245720 | 1246 |
| 523822 | AAAATATTGAAAGGCCCATC | Intron 3 | 68 | 246501 | 246520 | 1247 |
| 523823 | AATGTCAATAGTGCCCTATT | Intron 3 | 48 | 247431 | 247450 | 1248 |
| 523824 | ACAGTATATTCAGTCCAAGG | Intron 3 | 82 | 248231 | 248250 | 1249 |
| 523825 | TGTCTATTTAAGTTTGTTGC | Intron 3 | 45 | 250001 | 250020 | 1250 |
| 523826 | TTCAAGTACTGTCATGAATA | Intron 3 | 47 | 251214 | 251233 | 1251 |
| 523827 | TTTCTTTTTCTTAAACTAAG | Intron 3 | 11 | 252041 | 252060 | 1252 |
| 523828 | GTTTCTATTGTTGCCACCTT | Intron 3 | 70 | 252841 | 252860 | 1253 |
| 523829 | AAGGCCACATATTATAGTAT | Intron 3 | 29 | 253698 | 253717 | 1254 |
| 523830 | ACCTGAACTATTAATTTCTT | Intron 3 | 19 | 255397 | 255416 | 1255 |
| 523831 | GAATGGGCTGAGTAGTTGAA | Intron 3 | 47 | 256197 | 256216 | 1256 |
| 523832 | TGATGAACATTGCTAATTTG | Intron 3 | 26 | 257018 | 257037 | 1257 |
| 523833 | ATCTTGCCTCGATGAAAGTT | Intron 3 | 17 | 257818 | 257837 | 1258 |
| 523834 | TTAAGTGGCACAGCCATGAT | Intron 3 | 9 | 258774 | 258793 | 1259 |
| 523835 | AATGAGTTAAGTTGGAACAC | Intron 3 | 25 | 261294 | 261313 | 1260 |
| 523836 | TCCTTAGTAGAATGCCTGGA | Intron 3 | 57 | 263338 | 263357 | 1261 |
| 523837 | TATGTAGAAAAATAAGCTGG | Intron 3 | 0 | 266514 | 266533 | 1262 |
| 523838 | GCCGAGGCAGGCACCTGAGT | Intron 3 | 43 | 267375 | 267394 | 1263 |
| 523839 | TGGTACCTATATTGAGAGGT | Intron 4 | 46 | 269052 | 269071 | 1264 |
| 523840 | TTAAGGAAAAATATAGTATA | Intron 4 | 7 | 269854 | 269873 | 1265 |
| 523841 | TTATTTATGTGTCAGGGATG | Intron 4 | 28 | 270668 | 270687 | 1266 |
| 523842 | CAAAAGTTAAGTGCTTTAGG | Intron 4 | 10 | 271468 | 271487 | 1267 |
| 523843 | TTCATAGATGTCTAAGGAAT | Intron 4 | 32 | 273341 | 273360 | 1268 |
| 523844 | ACCTGTGATTTACCTATTTC | Exon 5-intron 5 | 18 | 274185 | 274204 | 1269 |
| | | junction | | | | |
| 523845 | TGCCTAGAAAACCACATAAA | Intron 5 | 38 | 274985 | 275004 | 1270 |
| 523846 | AAACATCCTCAAAGGTACCT | Intron 5 | 64 | 275808 | 275827 | 1271 |
| 523847 | CTTCCCTGAGACACACACAT | Intron 5 | 35 | 276617 | 276636 | 1272 |
| 523848 | CTTCTTCAATCTTCTCATAC | Intron 5 | 33 | 278288 | 278307 | 1273 |
| 523849 | TACCATTTTCCATTTAGTTT | Exon 6-intron 6 | 7 | 279088 | 279107 | 1274 |
| | | junction | | | | |
| 523850 | ATTGGCATCTTTTTCAGTGG | Intron 6 | 34 | 279902 | 279921 | 1275 |
| 523851 | TCAAGCTCACGGTTGGAGAC | Intron 6 | 36 | 280799 | 280818 | 1276 |
| 523852 | AAATGAAATCAGTATGTTGA | Intron 6 | 0 | 281622 | 281641 | 1277 |
| 523853 | TGATTTATCACAAAGGTGCT | Intron 6 | 29 | 282437 | 282456 | 1278 |
| 523854 | AAAACAGTAGAAAAGATTAA | Intron 6 | 14 | 284073 | 284092 | 1279 |
| 523855 | CTACATCACAGCAGTCAGAA | Intron 6 | 23 | 285187 | 285206 | 1280 |
| 523856 | AAAAGATGTAAGTGTGACAT | Intron 6 | 28 | 286349 | 286368 | 1281 |
| | | | | 286919 | 286938 | |
| 523857 | TTACAAGAACTGCTAAAGGG | Intron 6 | 15 | 287151 | 287170 | 1282 |
| 523858 | ATAAAGAAAAAGTTAACTGA | Intron 6 | 9 | 287982 | 288001 | 1283 |
| 523859 | AGATAATATACTTCTTCTAT | Intron 6 | 4 | 288809 | 288828 | 1284 |
| 523860 | CCTTCTTCACATGTAAATTG | Exon 7-intron 7 | 19 | 290456 | 290475 | 1285 |
| | | junction | | | | |
| 523861 | TTTCTATGTAGCTTGTGGTT | Intron 7 | 30 | 291258 | 291277 | 1286 |
| 523862 | AGGCAGAGTTTTTATTGATA | Intron 7 | 19 | 292058 | 292077 | 1287 |
| 523863 | ATAGTCACCAGCCTAAGCCT | Intron 8 | 28 | 292858 | 292877 | 1288 |
| 523864 | AGACTTTTAGCATGCTTGAC | Intron 8 | 56 | 293658 | 293677 | 1289 |
| 523865 | TTTACAGCCCTACAGTTCTA | Intron 8 | 7 | 294464 | 294483 | 1290 |
| 523866 | CCAGAGAACCTGACTCCAAA | Intron 8 | 6 | 295330 | 295349 | 1291 |
| 523867 | CAGAAGAAAATATTAGACAG | Intron 8 | 10 | 296993 | 297012 | 1292 |

TABLE 140
Inhibition of GHR mRNA by 5-10-5 MOE gapmers targeting
introns 3-8 of SEQ ID NO: 2

| | | | | SEQ | SEQ | |
|---|---|---|---|---|---|---|
| | | | | ID | ID | |
| | | | | NO: 2 | NO: 2 | SEQ |
| ISIS | | Target | % | Start | Stop | ID |
| NO | Sequence | Region | inhibition | Site | Site | NO |
| 532531 | TATTATACTTCTAAATTCCC | Intron 3 | 70 | 236716 | 236735 | 1293 |
| 532532 | TAAAAGCAAGAAAAAGGAAC | Intron 3 | 52 | 236889 | 236908 | 1294 |
| 532533 | CCTAATTTATATGAACAAAC | Intron 3 | 56 | 237177 | 237196 | 1295 |
| 532534 | TGCAATGCCTTAGCCTAAAA | Intron 3 | 86 | 238087 | 238106 | 1296 |
| 532535 | CACCACCATTATTACACTAC | Intron 3 | 75 | 238186 | 238205 | 1297 |
| 532536 | AAATAAATCAGATTATTATA | Intron 3 | 52 | 238242 | 238261 | 1298 |
| 532537 | CTTAGATCTGTGCTGTCCAA | Intron 3 | 81 | 245758 | 245777 | 1299 |
| 532538 | GTTAGTGTTAGATTCTTTGA | Intron 3 | 67 | 246152 | 246171 | 1300 |
| 532539 | CATGCTCACGGCTGTGTTAC | Intron 3 | 66 | 246248 | 246267 | 1301 |
| 532540 | CCCATCAAATACTGAGTTCT | Intron 3 | 86 | 246487 | 246506 | 1302 |
| 532541 | GAAAGTAGTGATTAATGAGA | Intron 3 | 38 | 247012 | 247031 | 1303 |
| 532542 | ATTAATCAACAAGTGGCATT | Intron 3 | 72 | 247203 | 247222 | 1304 |
| 532543 | TTTAATTTTAGGGTTTAGAG | Intron 3 | 48 | 248344 | 248363 | 1305 |
| 532544 | CTTGCTACCACTAGAGCCTT | Intron 3 | 69 | 248694 | 248713 | 1306 |
| 532545 | ACCACTGACTTATATCATTT | Intron 3 | 58 | 248743 | 248762 | 1307 |
| 532546 | TTCCCCATTGCTAATTTTGT | Intron 3 | 48 | 251601 | 251620 | 1308 |
| 532547 | TCCTGAAACTTAGTAGCTGG | Intron 3 | 83 | 253147 | 253166 | 1309 |
| 532548 | TGTCTTAAAAAGGAATAAAA | Intron 3 | 52 | 253785 | 253804 | 1310 |
| 532549 | CCTATAATAAAGTATTGTCT | Intron 3 | 70 | 253800 | 253819 | 1311 |
| 532550 | ATGTAAAATGGTATAGCTAC | Intron 3 | 50 | 254040 | 254059 | 1312 |
| 532551 | AACCCTCACACACTTCTGTT | Intron 3 | 71 | 254064 | 254083 | 1313 |
| 532552 | ATTCTGCATAAGCAGTGTTT | Intron 3 | 53 | 254246 | 254265 | 1314 |
| 532553 | TTACTACCCTGAAGAAGAAC | Intron 3 | 35 | 254314 | 254333 | 1315 |
| 532554 | AAGACCTATAACTTACTACC | Intron 3 | 49 | 254326 | 254345 | 1316 |
| 532555 | TTTCACAAGATTTACTTGGT | Intron 3 | 77 | 254641 | 254660 | 1317 |
| 532556 | CAGTTGTGATTGTCAACCTA | Intron 3 | 77 | 257073 | 257092 | 1318 |
| 532557 | AATCTTGCCTCGATGAAAGT | Intron 3 | 57 | 257819 | 257838 | 1319 |
| 532558 | TGGCCTAAATGTATCAGTTA | Intron 3 | 66 | 259157 | 259176 | 1320 |
| 532559 | AGGCTTTGGGTAAAATCTTT | Intron 3 | 67 | 259184 | 259203 | 1321 |
| 532560 | TATGATTTTTAAAGATTAAA | Intron 3 | 20 | 261419 | 261438 | 1322 |
| 532561 | GTACAGTGAAAAAGATGTGT | Intron 3 | 56 | 263666 | 263685 | 1323 |
| 532562 | GACAGGTATGAAGCAAAACA | Intron 3 | 64 | 267033 | 267052 | 1324 |
| 532563 | TGAGCTGAGGGTCTTTGCCG | Intron 3 | 61 | 267391 | 267410 | 1325 |
| 532564 | AGGCTGAGTTGTACACAAAC | Intron 4 | 52 | 269422 | 269441 | 1326 |
| 532565 | ATGAGGAGGCTGAGTTGTAC | Intron 4 | 43 | 269428 | 269447 | 1327 |
| 532566 | TCATAAAGTGGGCCCAGCTT | Intron 4 | 70 | 270044 | 270063 | 1328 |
| 532567 | ACTCCTAATCCCTCAGTTTT | Intron 4 | 62 | 270492 | 270511 | 1329 |
| 532568 | TTTACATGCAAGGAGCTGAG | Intron 4 | 61 | 271047 | 271066 | 1330 |
| 532569 | TAATGCCCTTTCTCCCTACT | Intron 4 | 60 | 271215 | 271234 | 1331 |
| 532570 | CCTGTTTAGATTATCCCAAA | Intron 4 | 62 | 271763 | 271782 | 1332 |
| 532571 | CATGATTCACAGAATTTCTC | Intron 4 | 56 | 271831 | 271850 | 1333 |
| 532572 | AGTTAGAAAACTCAAAGTAT | Intron 4 | 2 | 271915 | 271934 | 1334 |
| 532573 | TCAAATGTACTTAGCATAAG | Intron 4 | 9 | 271947 | 271966 | 1335 |
| 532574 | ATATCAAATGTACTTAGCAT | Intron 4 | 59 | 271950 | 271969 | 1336 |
| 532575 | AAAGTTCAGAAGAGGGAATG | Intron 4 | 51 | 273233 | 273252 | 1337 |
| 532576 | AATTCCCATCTGAGTAGTTT | Intron 4 | 56 | 273440 | 273459 | 1338 |
| 532577 | GTCCCCTAATTTCAGGCTAA | Intron 4 | 31 | 273471 | 273490 | 1339 |
| 532578 | CTATGTCAAATGAAACAAAA | Intron 5 | 38 | 274205 | 274224 | 1340 |
| 532579 | TGATTATGCTTTGTGATAAA | Intron 5 | 42 | 274624 | 274643 | 1341 |
| 532580 | TCCAGCTGACTAGGAGGGCT | Intron 5 | 7 | 275732 | 275751 | 1342 |
| 532581 | CATACCAGTCTCCTCGCTCA | Intron 5 | 0 | 276738 | 276757 | 1343 |
| 532582 | ATATAACAGAATCCAACCAT | Intron 5 | 47 | 277045 | 277064 | 1344 |
| | | | | 278361 | 278380 | |
| 532583 | TGCAAAATGGCCAAACTACA | Intron 5 | 56 | 277577 | 277596 | 1345 |
| 532584 | TCTTCCTAGCCACATGTGAT | Intron 5 | 32 | 278227 | 278246 | 1346 |
| 532585 | TACCATGCTCTCTAATTGCC | Intron 6 | 47 | 279624 | 279643 | 1347 |
| 532586 | AGTGATCTGTGCCAGGCTGC | Intron 6 | 65 | 279848 | 279867 | 1348 |
| 532587 | AAGTTACAGAACAGATATCT | Intron 6 | 61 | 280012 | 280031 | 1349 |
| 532588 | GTATTGTGAAAATAGTACTG | Intron 6 | 45 | 280226 | 280245 | 1350 |
| 532589 | AAACACTATCAAGCTCACGG | Intron 6 | 54 | 280807 | 280826 | 1351 |
| 532590 | TTCAAGAAAAGTCTTCAAAT | Intron 6 | 24 | 280831 | 280850 | 1352 |
| 532591 | GGATCATTTCCCCATGCATG | Intron 6 | 52 | 280982 | 281001 | 1353 |
| 532592 | ATATTATATTAAGAAAAATG | Intron 6 | 4 | 281422 | 281441 | 1354 |
| 532593 | CTCCCATGTTCATTACTTAT | Intron 6 | 49 | 281587 | 281606 | 1355 |
| 532594 | CATGACATTGGTTTGGGCAA | Intron 6 | 43 | 282229 | 282248 | 1356 |
| 532595 | AATGTTGTTGGGAAAATTGG | Intron 6 | 42 | 282383 | 282402 | 1357 |
| 532596 | AGCTGCAGGATACAAAGTCA | Intron 6 | 49 | 282986 | 283005 | 1358 |
| 532597 | ATATCCTTTCATGATAAAAA | Intron 6 | 31 | 283354 | 283373 | 1359 |
| 532598 | ATGGGCTAATATCTCTGATA | Intron 6 | 50 | 283590 | 283609 | 1360 |
| 532599 | ACATTACTAATAATTAGAGA | Intron 6 | 0 | 285236 | 285255 | 1361 |
| 532600 | ATAAAAACATATGAAAGTAT | Intron 6 | 12 | 287093 | 287112 | 1362 |
| 532601 | TTCTGAATTAAATCTATTAG | Intron 6 | 16 | 287408 | 287427 | 1363 |
| 532602 | TTACATTTTTGCAAATTTAT | Intron 6 | 31 | 287472 | 287491 | 1364 |
| 532603 | TGAACAGTTGATTAACAAAG | Intron 6 | 15 | 287887 | 287906 | 1365 |
| 532604 | AAGTTATTGGTTTACTAGAT | Intron 6 | 0 | 288598 | 288617 | 1366 |
| 532605 | TTGGAAAAGGTCCTAGAAAA | Intron 6 | 24 | 289808 | 289827 | 1367 |
| 532606 | CATGACAGAAACTTCTTAGA | Intron 7 | 25 | 292035 | 292054 | 1368 |
| 532607 | CCATACTTGCTGACAAATAT | Intron 8 | 39 | 294389 | 294408 | 1369 |

### Example 115: Dose-Dependent Antisense Inhibition of Human GHR in Hep3B Cells by MOE Gapmers

[1115] Gapmers from the studies described above exhibiting significant in vitro inhibition of GHR mRNA were selected and tested at various doses in Hep3B cells. The antisense oligonucleotides were tested in a series of experiments that had similar culture conditions. The results for each experiment are presented in separate tables shown below. Cells were plated at a density of 20,000 cells per well and transfected using electroporation with 0.625 μM, 1.25 μM, 2.50 μM, 5.00 μM and 10.00 μM concentrations of antisense oligonucleotide, as specified in the Tables below. After a treatment period of approximately 16 hours, RNA was isolated from the cells and GHR mRNA levels were measured by quantitative real-time PCR. Human primer probe set RTS3437_MGB was used to measure mRNA levels. GHR mRNA levels were adjusted according to total RNA content, as measured by RIBOGREEN®. Results are presented as percent inhibition of GHR, relative to untreated control cells.

[1116] The half maximal inhibitory concentration (IC₅₀) of each oligonucleotide is also presented. GHR mRNA levels were significantly reduced in a dose-dependent manner in antisense oligonucleotide treated cells.

TABLE 141

| | | | | | 10.00 | IC₅₀ |
|---|---|---|---|---|---|---|
| ISIS No | 0.625 μM | 1.250 μM | 2.50 μM | 5.00 μM | μM | (μM) |
| 523271 | 41 | 61 | 73 | 86 | 92 | 0.8 |
| 523274 | 20 | 36 | 64 | 80 | 92 | 1.8 |
| 523324 | 35 | 45 | 68 | 91 | 90 | 1.2 |

TABLE 142

| | | | | | 10.00 | IC₅₀ |
|---|---|---|---|---|---|---|
| ISIS No | 0.625 μM | 1.250 μM | 2.50 μM | 5.00 μM | μM | (μM) |
| 523604 | 21 | 42 | 68 | 58 | 86 | 2.0 |
| 523577 | 6 | 22 | 56 | 66 | 91 | 2.7 |
| 523614 | 14 | 44 | 61 | 84 | 87 | 1.9 |
| 523564 | 4 | 26 | 48 | 67 | 86 | 2.8 |
| 523633 | 30 | 43 | 71 | 82 | 84 | 1.4 |
| 523571 | 2 | 9 | 38 | 55 | 82 | 3.9 |

TABLE 143

| | | | | | 10.00 | IC₅₀ |
|---|---|---|---|---|---|---|
| ISIS No | 0.625 μM | 1.250 μM | 2.50 μM | 5.00 μM | μM | (μM) |
| 523570 | 25 | 50 | 64 | 77 | 88 | 1.5 |
| 523592 | 27 | 42 | 59 | 79 | 88 | 1.7 |
| 523595 | 21 | 50 | 62 | 76 | 90 | 1.6 |
| 523596 | 36 | 47 | 62 | 75 | 77 | 1.4 |
| 523607 | 49 | 62 | 71 | 82 | 84 | 0.5 |
| 523615 | 20 | 49 | 63 | 83 | 91 | 1.6 |
| 523630 | 4 | 28 | 54 | 79 | 78 | 2.6 |
| 523661 | 4 | 34 | 48 | 73 | 79 | 2.7 |
| 523665 | 4 | 28 | 54 | 73 | 79 | 2.7 |
| 523687 | 30 | 56 | 61 | 78 | 81 | 1.4 |
| 523711 | 42 | 66 | 78 | 94 | 95 | 0.7 |
| 523712 | 6 | 37 | 60 | 72 | 89 | 2.3 |
| 523713 | 4 | 32 | 55 | 72 | 85 | 2.5 |
| 523714 | 59 | 75 | 88 | 95 | 97 | 0.2 |

TABLE 144

| | | | | | 10.00 | IC₅₀ |
|---|---|---|---|---|---|---|
| ISIS No | 0.625 μM | 1.250 μM | 2.50 μM | 5.00 μM | μM | (μM) |
| 523655 | 26 | 33 | 60 | 67 | 78 | 2.1 |
| 523656 | 19 | 33 | 45 | 69 | 87 | 2.4 |
| 523658 | 0 | 42 | 62 | 67 | 79 | 3.1 |
| 523715 | 78 | 90 | 92 | 93 | 95 | <0.6 |
| 523718 | 30 | 46 | 67 | 84 | 92 | 1.4 |
| 523723 | 56 | 69 | 83 | 92 | 94 | 0.3 |
| 523725 | 45 | 64 | 79 | 89 | 95 | 0.6 |
| 523726 | 32 | 48 | 77 | 88 | 89 | 1.2 |
| 523736 | 0 | 64 | 75 | 90 | 96 | 1.5 |
| 523747 | 48 | 64 | 80 | 91 | 92 | 0.6 |
| 523758 | 25 | 39 | 61 | 74 | 84 | 1.9 |
| 523766 | 7 | 37 | 66 | 81 | 93 | 2.0 |
| 523776 | 26 | 54 | 72 | 78 | 83 | 1.3 |
| 523789 | 62 | 68 | 81 | 85 | 90 | 0.2 |

TABLE 145

| | | | | | 10.00 | IC₅₀ |
|---|---|---|---|---|---|---|
| ISIS No | 0.625 μM | 1.250 μM | 2.50 μM | 5.00 μM | μM | (μM) |
| 523719 | 24 | 46 | 65 | 84 | 93 | 1.5 |
| 523720 | 18 | 49 | 72 | 85 | 93 | 1.5 |
| 523724 | 43 | 61 | 77 | 91 | 91 | 0.7 |
| 523735 | 8 | 42 | 63 | 81 | 93 | 2.0 |
| 523740 | 37 | 58 | 72 | 83 | 88 | 1.0 |
| 523752 | 9 | 29 | 52 | 72 | 86 | 2.5 |
| 523763 | 8 | 32 | 57 | 70 | 80 | 2.6 |
| 523764 | 43 | 52 | 67 | 77 | 79 | 0.9 |
| 523765 | 24 | 48 | 62 | 88 | 4 | 1.5 |
| 523767 | 49 | 62 | 67 | 72 | 82 | 0.6 |
| 523772 | 29 | 39 | 54 | 62 | 61 | 2.7 |
| 523774 | 28 | 59 | 63 | 88 | 91 | 1.2 |
| 523778 | 25 | 32 | 63 | 78 | 84 | 1.9 |
| 523783 | 0 | 22 | 53 | 72 | 88 | 2.8 |

TABLE 146

| | | | | | 10.00 | IC₅₀ |
|---|---|---|---|---|---|---|
| ISIS No | 0.625 μM | 1.250 μM | 2.50 μM | 5.00 μM | μM | (μM) |
| 532151 | 57 | 69 | 76 | 85 | 88 | <0.6 |
| 532153 | 23 | 43 | 54 | 80 | 86 | 1.8 |
| 532158 | 46 | 58 | 81 | 87 | 87 | 0.6 |
| 532160 | 17 | 26 | 55 | 76 | 92 | 2.2 |
| 532162 | 14 | 46 | 71 | 83 | 93 | 1.7 |
| 532164 | 37 | 76 | 82 | 90 | 93 | 0.6 |
| 532171 | 41 | 81 | 67 | 81 | 83 | <0.6 |
| 532181 | 56 | 81 | 84 | 89 | 93 | 0.2 |
| 532186 | 26 | 65 | 75 | 83 | 91 | 1.1 |
| 532188 | 51 | 68 | 80 | 89 | 93 | <0.6 |
| 532189 | 24 | 31 | 52 | 75 | 86 | 2.1 |
| 532197 | 0 | 40 | 66 | 85 | 93 | 2.1 |
| 532199 | 24 | 37 | 50 | 73 | 87 | 2.1 |
| 532222 | 12 | 41 | 67 | 84 | 94 | 1.8 |

TABLE 147

| | | | | | 10.00 | IC₅₀ |
|---|---|---|---|---|---|---|
| ISIS No | 0.625 μM | 1.250 μM | 2.50 μM | 5.00 μM | μM | (μM) |
| 532175 | 41 | 54 | 76 | 84 | 89 | 0.9 |
| 532223 | 53 | 69 | 75 | 88 | 94 | <0.6 |
| 532235 | 43 | 58 | 67 | 77 | 82 | 0.8 |
| 532241 | 39 | 53 | 62 | 73 | 87 | 1.2 |
| 532248 | 49 | 65 | 72 | 85 | 93 | 0.6 |
| 532254 | 52 | 62 | 85 | 87 | 92 | <0.6 |
| 532300 | 20 | 29 | 49 | 66 | 78 | 2.7 |
| 532304 | 26 | 39 | 66 | 78 | 90 | 1.7 |
| 532316 | 41 | 66 | 76 | 86 | 94 | 0.7 |
| 532395 | 32 | 56 | 84 | 93 | 97 | 1.0 |
| 532401 | 47 | 80 | 92 | 96 | 98 | <0.6 |
| 532411 | 73 | 90 | 94 | 97 | 98 | <0.6 |
| 532420 | 38 | 49 | 82 | 85 | 97 | 1.0 |
| 532436 | 37 | 58 | 75 | 90 | 96 | 0.9 |

TABLE 148

| | | | | | 10.00 | IC₅₀ |
|---|---|---|---|---|---|---|
| ISIS No | 0.625 μM | 1.250 μM | 2.50 μM | 5.00 μM | μM | (μM) |
| 532410 | 66 | 83 | 92 | 94 | 97 | <0.6 |
| 532468 | 45 | 68 | 78 | 93 | 94 | 0.6 |
| 532469 | 0 | 17 | 56 | 76 | 92 | 2.8 |
| 532470 | 10 | 34 | 62 | 84 | 94 | 2.0 |
| 532475 | 13 | 36 | 52 | 64 | 87 | 2.5 |
| 532476 | 34 | 64 | 73 | 79 | 93 | 0.9 |
| 532480 | 28 | 54 | 67 | 78 | 87 | 1.4 |
| 532482 | 21 | 39 | 69 | 83 | 92 | 1.7 |
| 532490 | 42 | 60 | 68 | 84 | 93 | 0.9 |
| 532500 | 37 | 50 | 63 | 81 | 87 | 1.2 |
| 532506 | 13 | 41 | 66 | 75 | 89 | 1.9 |
| 532507 | 47 | 59 | 71 | 86 | 89 | 0.7 |
| 532508 | 0 | 31 | 73 | 83 | 89 | 2.2 |
| 532526 | 31 | 56 | 78 | 79 | 88 | 1.1 |

TABLE 149

| | | | | | 10.00 | IC₅₀ |
|---|---|---|---|---|---|---|
| ISIS No | 0.625 μM | 1.250 μM | 2.50 μM | 5.00 μM | μM | (μM) |
| 532495 | 59 | 74 | 81 | 87 | 95 | <0.6 |
| 532501 | 49 | 53 | 71 | 83 | 84 | 0.7 |
| 532534 | 53 | 75 | 85 | 91 | 97 | <0.6 |
| 532535 | 0 | 34 | 61 | 84 | 92 | 2.6 |
| 532537 | 49 | 67 | 80 | 90 | 94 | <0.6 |
| 532540 | 59 | 70 | 87 | 93 | 95 | <0.6 |
| 532547 | 57 | 71 | 81 | 91 | 92 | <0.6 |
| 532555 | 48 | 36 | 61 | 72 | 85 | 1.3 |
| 532556 | 33 | 57 | 67 | 86 | 90 | 1.1 |

TABLE 150

| | | | | | 10.00 | IC₅₀ |
|---|---|---|---|---|---|---|
| ISIS No | 0.625 μM | 1.250 μM | 2.50 μM | 5.00 μM | μM | (μM) |
| 523421 | 32 | 57 | 81 | 82 | 88 | 1.0 |
| 533006 | 46 | 43 | 69 | 83 | 91 | 1.0 |
| 533121 | 53 | 75 | 75 | 88 | 93 | <0.6 |
| 533122 | 65 | 77 | 82 | 90 | 93 | <0.6 |
| 533123 | 39 | 71 | 84 | 91 | 95 | 0.6 |
| 533125 | 49 | 61 | 81 | 85 | 91 | 0.6 |
| 533131 | 3 | 57 | 59 | 82 | 90 | 1.9 |
| 533136 | 32 | 65 | 62 | 81 | 88 | 1.1 |
| 533139 | 13 | 51 | 72 | 90 | 94 | 1.5 |
| 533140 | 36 | 66 | 39 | 87 | 92 | 1.2 |
| 533153 | 50 | 65 | 83 | 89 | 90 | <0.6 |
| 533156 | 43 | 64 | 74 | 85 | 90 | 0.7 |
| 533160 | 57 | 80 | 87 | 91 | 95 | <0.6 |
| 533161 | 54 | 62 | 81 | 89 | 92 | <0.6 |

TABLE 151

| | | | | | 10.00 | IC₅₀ |
|---|---|---|---|---|---|---|
| ISIS No | 0.625 μM | 1.250 μM | 2.50 μM | 5.00 μM | μM | (μM) |
| 533234 | 50 | 70 | 86 | 93 | 95 | <0.6 |
| 533237 | 5 | 45 | 63 | 84 | 93 | 1.9 |
| 533233 | 43 | 55 | 76 | 90 | 95 | 0.8 |
| 533179 | 31 | 63 | 75 | 87 | 87 | 1.0 |
| 533178 | 53 | 67 | 76 | 89 | 94 | <0.6 |
| 533187 | 5 | 15 | 53 | 79 | 86 | 2.7 |
| 533188 | 49 | 68 | 83 | 89 | 94 | <0.6 |
| 533271 | 45 | 66 | 85 | 92 | 94 | 0.6 |
| 533134 | 22 | 45 | 64 | 81 | 89 | 1.6 |
| 533258 | 52 | 72 | 88 | 93 | 95 | <0.6 |
| 533235 | 50 | 54 | 75 | 82 | 90 | 0.7 |
| 533262 | 23 | 54 | 78 | 91 | 96 | 1.2 |
| 533189 | 48 | 66 | 78 | 82 | 88 | <0.6 |
| 533193 | 38 | 53 | 72 | 77 | 91 | 1.0 |

TABLE 152

| | | | | | 10.00 | IC₅₀ |
|---|---|---|---|---|---|---|
| ISIS No | 0.625 μM | 1.250 μM | 2.50 μM | 5.00 μM | μM | (μM) |
| 533259 | 63 | 78 | 84 | 90 | 92 | <0.6 |
| 533291 | 25 | 57 | 75 | 86 | 96 | 1.2 |
| 533256 | 67 | 76 | 90 | 95 | 95 | <0.6 |
| 533269 | 42 | 75 | 82 | 94 | 97 | 0.6 |
| 533265 | 67 | 78 | 91 | 95 | 97 | <0.6 |
| 533318 | 16 | 45 | 77 | 87 | 95 | 1.5 |
| 533257 | 55 | 84 | 91 | 96 | 96 | <0.6 |
| 533280 | 34 | 62 | 80 | 91 | 91 | 0.9 |
| 533301 | 52 | 77 | 84 | 93 | 96 | <0.6 |
| 533316 | 41 | 50 | 79 | 93 | 94 | 0.9 |
| 533270 | 62 | 71 | 88 | 94 | 97 | <0.6 |
| 533330 | 46 | 76 | 93 | 97 | 98 | <0.6 |
| 533317 | 55 | 60 | 82 | 87 | 96 | <0.6 |
| 533315 | 39 | 56 | 82 | 87 | 93 | 0.9 |

TABLE 153

| | | | | | 10.00 | IC₅₀ |
|---|---|---|---|---|---|---|
| ISIS No | 0.625 μM | 1.250 μM | 2.50 μM | 5.00 μM | μM | (μM) |
| 533364 | 71 | 77 | 92 | 90 | 94 | <0.6 |
| 533925 | 26 | 55 | 61 | 85 | 91 | 1.4 |
| 533326 | 54 | 77 | 80 | 93 | 95 | <0.6 |
| 533916 | 18 | 62 | 69 | 83 | 93 | 1.4 |
| 533328 | 52 | 68 | 89 | 94 | 98 | <0.6 |
| 533932 | 42 | 49 | 80 | 86 | 92 | 0.9 |
| 533352 | 42 | 82 | 88 | 93 | 94 | <0.6 |
| 533917 | 20 | 37 | 57 | 78 | 84 | 2.0 |
| 533331 | 54 | 83 | 89 | 93 | 96 | <0.6 |
| 533936 | 21 | 46 | 73 | 84 | 88 | 1.5 |
| 533329 | 56 | 73 | 84 | 92 | 98 | <0.6 |
| 533937 | 26 | 32 | 79 | 86 | 94 | 1.5 |
| 533908 | 58 | 66 | 81 | 88 | 94 | <0.6 |
| 533898 | 61 | 64 | 84 | 90 | 92 | <0.6 |

TABLE 154

| | | | | | 10.00 | IC₅₀ |
|---|---|---|---|---|---|---|
| ISIS No | 0.625 μM | 1.250 μM | 2.50 μM | 5.00 μM | μM | (μM) |
| 539371 | 32 | 41 | 82 | 92 | 98 | 1.2 |
| 539382 | 18 | 58 | 74 | 91 | 97 | 1.3 |
| 539392 | 34 | 59 | 79 | 94 | 96 | 0.9 |
| 539398 | 31 | 53 | 89 | 94 | 98 | 1.0 |
| 539399 | 31 | 72 | 87 | 95 | 97 | 0.8 |
| 539400 | 36 | 60 | 79 | 93 | 97 | 0.9 |
| 539405 | 33 | 58 | 74 | 91 | 94 | 1.0 |
| 539412 | 23 | 61 | 80 | 93 | 95 | 1.1 |
| 539413 | 53 | 75 | 86 | 92 | 96 | <0.6 |
| 539415 | 47 | 62 | 84 | 91 | 96 | 0.6 |
| 539416 | 61 | 85 | 94 | 97 | 96 | <0.6 |
| 539430 | 24 | 48 | 68 | 80 | 93 | 1.5 |
| 539431 | 14 | 40 | 71 | 89 | 95 | 1.7 |
| 539433 | 46 | 67 | 74 | 92 | 95 | 0.6 |

### Example 116: Dose-Dependent Antisense Inhibition of Human GHR in Hep3B Cells by MOE Gapmers

[1117] Gapmers from the studies described above exhibiting significant in vitro inhibition of GHR mRNA were selected and tested at various doses in Hep3B cells. The antisense oligonucleotides were tested in a series of experiments that had similar culture conditions. The results for each experiment are presented in separate tables shown below. Cells were plated at a density of 20,000 cells per well and transfected using electroporation with 0.3125 μM, 0.625 μM, 1.25 μM, 2.50 μM, 5.00 μM and 10.00 μM concentrations of antisense oligonucleotide, as specified in the Tables below. After a treatment period of approximately 16 hours, RNA was isolated from the cells and GHR mRNA levels were measured by quantitative real-time PCR. Human primer probe set RTS3437_MGB was used to measure mRNA levels. GHR mRNA levels were adjusted according to total RNA content, as measured by RIBOGREEN®. Results are presented as percent inhibition of GHR, relative to untreated control cells.

[1118] The half maximal inhibitory concentration (IC₅₀) of each oligonucleotide is also presented. GHR mRNA levels were significantly reduced in a dose-dependent manner in antisense oligonucleotide treated cells.

TABLE 155

| | 0.3125 | 0.625 | 1.250 | 2.50 | | | IC₅₀ |
|---|---|---|---|---|---|---|---|
| ISIS No | μM | μM | μM | μM | 5.00 μM | 10.00 μM | (μM) |
| 523814 | 0 | 24 | 48 | 52 | 68 | 82 | 2.2 |
| 523805 | 13 | 29 | 55 | 0 | 79 | 85 | 1.5 |
| 523822 | 0 | 19 | 26 | 41 | 65 | 85 | 2.8 |
| 523820 | 0 | 19 | 29 | 58 | 74 | 86 | 2.3 |
| 523815 | 3 | 6 | 19 | 37 | 45 | 71 | 4.8 |
| 523828 | 12 | 19 | 32 | 51 | 64 | 74 | 2.7 |
| 523801 | 3 | 9 | 31 | 43 | 59 | 76 | 3.3 |
| 523824 | 12 | 28 | 44 | 63 | 77 | 85 | 1.7 |
| 523794 | 13 | 21 | 30 | 51 | 66 | 78 | 2.5 |
| 523810 | 15 | 34 | 55 | 72 | 78 | 86 | 1.3 |
| 523819 | 0 | 24 | 40 | 60 | 66 | 75 | 2.4 |

TABLE 156

| | | | 1.250 | 2.50 | 5.00 | 10.00 | IC₅₀ |
|---|---|---|---|---|---|---|---|
| ISIS No | 0.3125 μM | 0.625 μM | μM | μM | μM | μM | (μM) |
| 539302 | 31 | 56 | 80 | 92 | 97 | 98 | 0.5 |
| 539314 | 16 | 28 | 49 | 69 | 85 | 95 | 1.3 |
| 539319 | 8 | 30 | 45 | 71 | 90 | 94 | 1.4 |
| 539320 | 11 | 42 | 64 | 83 | 92 | 95 | 1.0 |
| 539321 | 25 | 48 | 64 | 82 | 95 | 97 | 0.8 |
| 539322 | 19 | 34 | 58 | 72 | 90 | 96 | 1.1 |
| 539331 | 7 | 14 | 46 | 69 | 88 | 96 | 1.6 |
| 539355 | 28 | 35 | 67 | 89 | 96 | 98 | 0.8 |
| 539358 | 12 | 39 | 56 | 80 | 93 | 98 | 1.1 |
| 539359 | 15 | 23 | 58 | 77 | 93 | 98 | 1.2 |

TABLE 157

| | | | 1.250 | 2.50 | 5.00 | 10.00 | IC₅₀ |
|---|---|---|---|---|---|---|---|
| ISIS No | 0.3125 μM | 0.625 μM | μM | μM | μM | μM | (μM) |
| 539318 | 23 | 21 | 56 | 73 | 88 | 94 | 1.2 |
| 539325 | 14 | 26 | 38 | 74 | 92 | 98 | 1.4 |
| 539339 | 18 | 23 | 58 | 83 | 92 | 98 | 1.1 |
| 539341 | 17 | 29 | 62 | 84 | 94 | 95 | 1.0 |
| 539342 | 20 | 31 | 43 | 71 | 90 | 95 | 1.2 |
| 539352 | 15 | 23 | 41 | 61 | 89 | 95 | 1.5 |
| 539356 | 24 | 46 | 62 | 83 | 90 | 97 | 0.8 |
| 539361 | 37 | 42 | 73 | 88 | 96 | 98 | 0.6 |
| 539379 | 53 | 66 | 83 | 96 | 96 | 98 | 0.2 |
| 539380 | 52 | 77 | 91 | 97 | 97 | 99 | 0.1 |
| 539383 | 34 | 61 | 71 | 89 | 98 | 98 | 0.5 |

TABLE 158

| | | | 1.250 | 2.50 | 5.00 | 10.00 | IC₅₀ |
|---|---|---|---|---|---|---|---|
| ISIS No | 0.3125 μM | 0.625 μM | μM | μM | μM | μM | (μM) |
| 539360 | 45 | 60 | 81 | 94 | 97 | 98 | 0.3 |
| 539362 | 21 | 36 | 72 | 90 | 98 | 99 | 0.8 |
| 539375 | 23 | 36 | 66 | 85 | 95 | 99 | 0.9 |
| 539376 | 26 | 35 | 58 | 82 | 95 | 99 | 0.9 |
| 539377 | 29 | 31 | 43 | 64 | 85 | 89 | 1.3 |
| 539378 | 37 | 59 | 81 | 93 | 97 | 98 | 0.4 |
| 539389 | 34 | 61 | 61 | 87 | 95 | 97 | 0.5 |
| 539401 | 34 | 52 | 63 | 84 | 92 | 95 | 0.6 |
| 539403 | 52 | 73 | 83 | 94 | 97 | 98 | 0.1 |
| 539404 | 22 | 55 | 74 | 88 | 94 | 96 | 0.6 |
| 539432 | 32 | 50 | 75 | 86 | 94 | 96 | 0.6 |

### Example 117: Dose-Dependent Antisense Inhibition of Human GHR in Hep3B Cells by MOE Gapmers

[1119] Gapmers from studies described above exhibiting significant in vitro inhibition of GHR mRNA were selected and tested at various doses in Hep3B cells. The antisense oligonucleotides were tested in a series of experiments that had similar culture conditions. The results for each experiment are presented in separate tables shown below. Cells were plated at a density of 20,000 cells per well and transfected using electroporation with 0.625 μM, 1.25 μM, 2.50 μM, 5.00 μM and 10.00 μM concentrations of antisense oligonucleotide, as specified in the Tables below. After a treatment period of approximately 16 hours, RNA was isolated from the cells and GHR mRNA levels were measured by quantitative real-time PCR. Human primer probe set RTS3437_MGB was used to measure mRNA levels. GHR mRNA levels were adjusted according to total RNA content, as measured by RIBOGREEN®. Results are presented as percent inhibition of GHR, relative to untreated control cells.

[1120] The half maximal inhibitory concentration (IC₅₀) of each oligonucleotide is also presented. GHR mRNA levels were significantly reduced in a dose-dependent manner in antisense oligonucleotide treated cells.

TABLE 159

| | | | | | 10.00 | IC₅₀ |
|---|---|---|---|---|---|---|
| ISIS No | 0.625 μM | 1.250 μM | 2.50 μM | 5.00 μM | μM | (μM) |
| 523271 | 26 | 41 | 80 | 89 | 94 | 1.4 |
| 523274 | 13 | 35 | 63 | 85 | 95 | 1.9 |
| 523324 | 26 | 40 | 64 | 88 | 95 | 1.6 |
| 523577 | 27 | 50 | 72 | 87 | 95 | 1.3 |
| 523604 | 49 | 66 | 74 | 81 | 87 | 0.5 |
| 523614 | 43 | 54 | 82 | 92 | 89 | 0.8 |

TABLE 160

| | | | | | 10.00 | IC₅₀ |
|---|---|---|---|---|---|---|
| ISIS No | 0.625 μM | 1.250 μM | 2.50 μM | 5.00 μM | μM | (μM) |
| 523564 | 16 | 48 | 69 | 75 | 91 | 1.7 |
| 523570 | 24 | 52 | 65 | 71 | 88 | 1.6 |
| 523592 | 6 | 31 | 52 | 65 | 81 | 2.8 |
| 523595 | 13 | 49 | 60 | 79 | 92 | 1.8 |
| 523596 | 20 | 49 | 62 | 71 | 75 | 1.9 |
| 523607 | 38 | 63 | 66 | 74 | 76 | 0.8 |
| 523615 | 17 | 48 | 60 | 80 | 92 | 1.8 |
| 523630 | 19 | 42 | 42 | 67 | 80 | 2.5 |
| 523633 | 41 | 69 | 78 | 79 | 80 | 0.6 |
| 523665 | 16 | 45 | 56 | 71 | 80 | 2.1 |
| 523687 | 37 | 59 | 73 | 75 | 78 | 0.9 |
| 523711 | 33 | 63 | 78 | 91 | 93 | 0.9 |
| 523712 | 13 | 36 | 61 | 78 | 87 | 2.1 |
| 523714 | 63 | 85 | 91 | 96 | 96 | <0.6 |

TABLE 161

| | | | | | 10.00 | IC₅₀ |
|---|---|---|---|---|---|---|
| ISIS No | 0.625 μM | 1.250 μM | 2.50 μM | 5.00 μM | μM | (μM) |
| 523655 | 28 | 42 | 57 | 74 | 76 | 1.9 |
| 523656 | 33 | 43 | 53 | 74 | 88 | 1.7 |
| 523661 | 29 | 29 | 66 | 79 | 82 | 1.9 |
| 523713 | 35 | 45 | 64 | 83 | 87 | 1.3 |
| 523715 | 83 | 86 | 92 | 93 | 94 | <0.6 |
| 523718 | 27 | 52 | 69 | 84 | 95 | 1.3 |
| 523723 | 65 | 74 | 86 | 85 | 94 | <0.6 |
| 523725 | 37 | 63 | 78 | 78 | 92 | 0.8 |
| 523726 | 43 | 57 | 72 | 86 | 89 | 0.8 |
| 523736 | 39 | 65 | 80 | 88 | 95 | 0.8 |
| 523747 | 51 | 71 | 83 | 86 | 93 | <0.6 |
| 523766 | 30 | 50 | 70 | 82 | 89 | 1.3 |
| 523776 | 45 | 59 | 67 | 79 | 84 | 0.7 |
| 523789 | 63 | 75 | 76 | 83 | 83 | <0.6 |

TABLE 162

| | | | | | 10.00 | IC₅₀ |
|---|---|---|---|---|---|---|
| ISIS No | 0.625 μM | 1.250 μM | 2.50 μM | 5.00 μM | μM | (μM) |
| 523719 | 18 | 40 | 56 | 73 | 83 | 2.1 |
| 523720 | 36 | 46 | 59 | 64 | 89 | 1.5 |
| 523724 | 44 | 60 | 75 | 81 | 87 | 0.7 |
| 523735 | 11 | 40 | 60 | 78 | 84 | 2.1 |
| 523740 | 17 | 47 | 61 | 80 | 81 | 1.8 |
| 523752 | 25 | 31 | 38 | 70 | 84 | 2.5 |
| 523758 | 23 | 48 | 58 | 72 | 80 | 1.8 |
| 523763 | 2 | 24 | 48 | 64 | 75 | 3.3 |
| 523764 | 22 | 49 | 45 | 73 | 75 | 2.1 |
| 523765 | 42 | 40 | 57 | 79 | 87 | 1.4 |
| 523767 | 43 | 53 | 56 | 69 | 79 | 1.2 |
| 523774 | 36 | 52 | 71 | 81 | 89 | 1.1 |
| 523778 | 15 | 45 | 59 | 75 | 79 | 2.0 |
| 523783 | 5 | 30 | 48 | 66 | 83 | 2.9 |

TABLE 163

| | | | | | 10.00 | IC₅₀ |
|---|---|---|---|---|---|---|
| ISIS No | 0.625 μM | 1.250 μM | 2.50 μM | 5.00 μM | μM | (μM) |
| 532151 | 40 | 45 | 64 | 71 | 82 | 1.3 |
| 532158 | 28 | 47 | 63 | 70 | 87 | 1.6 |
| 532164 | 36 | 47 | 64 | 75 | 89 | 1.3 |
| 532171 | 35 | 47 | 50 | 69 | 89 | 1.6 |
| 532175 | 27 | 38 | 43 | 75 | 87 | 2.1 |
| 532181 | 21 | 56 | 63 | 69 | 80 | 1.7 |
| 532186 | 28 | 49 | 62 | 73 | 91 | 1.5 |
| 532188 | 40 | 52 | 73 | 75 | 90 | 1.0 |
| 532223 | 22 | 34 | 53 | 71 | 90 | 2.2 |
| 532235 | 35 | 31 | 48 | 68 | 73 | 2.3 |
| 532241 | 6 | 24 | 29 | 51 | 72 | 4.5 |
| 532248 | 19 | 37 | 47 | 73 | 84 | 2.3 |
| 532254 | 56 | 56 | 72 | 85 | 90 | 0.5 |
| 532316 | 32 | 55 | 50 | 78 | 90 | 1.5 |

TABLE 164

| | | | | | 10.00 | IC₅₀ |
|---|---|---|---|---|---|---|
| ISIS No | 0.625 μM | 1.250 μM | 2.50 μM | 5.00 μM | μM | (μM) |
| 532304 | 44 | 57 | 68 | 78 | 73 | 0.7 |
| 532395 | 47 | 62 | 82 | 91 | 96 | 0.6 |
| 532401 | 70 | 83 | 91 | 94 | 96 | <0.6 |
| 532410 | 56 | 71 | 85 | 90 | 96 | <0.6 |
| 532411 | 88 | 93 | 96 | 97 | 98 | <0.6 |
| 532420 | 61 | 67 | 82 | 85 | 96 | <0.6 |
| 532436 | 48 | 49 | 77 | 90 | 97 | 0.8 |
| 532468 | 42 | 67 | 82 | 89 | 94 | 0.6 |
| 532476 | 32 | 58 | 75 | 84 | 90 | 1.1 |
| 532482 | 5 | 26 | 56 | 71 | 87 | 2.6 |
| 532490 | 18 | 47 | 55 | 69 | 86 | 2.0 |
| 532501 | 4 | 22 | 43 | 59 | 77 | 3.5 |
| 532507 | 39 | 63 | 66 | 83 | 89 | 0.9 |
| 532526 | 30 | 48 | 67 | 82 | 88 | 1.4 |

TABLE 165

| | | | | | 10.00 | IC₅₀ |
|---|---|---|---|---|---|---|
| ISIS No | 0.625 μM | 1.250 μM | 2.50 μM | 5.00 μM | μM | (μM) |
| 533121 | 59 | 67 | 78 | 83 | 87 | 0.2 |
| 533122 | 48 | 73 | 78 | 84 | 90 | 0.4 |
| 533125 | 47 | 61 | 74 | 89 | 89 | 0.6 |
| 533136 | 5 | 25 | 58 | 79 | 90 | 2.4 |
| 533156 | 37 | 48 | 69 | 77 | 87 | 1.2 |
| 533161 | 28 | 67 | 77 | 89 | 90 | 1.0 |
| 533178 | 30 | 60 | 72 | 90 | 92 | 1.1 |
| 533179 | 37 | 66 | 76 | 76 | 87 | 0.8 |
| 533188 | 32 | 64 | 74 | 80 | 90 | 1.0 |
| 533189 | 49 | 66 | 77 | 81 | 81 | 0.4 |
| 533193 | 26 | 48 | 69 | 75 | 85 | 1.5 |
| 533233 | 39 | 60 | 59 | 84 | 93 | 1.0 |
| 533234 | 45 | 69 | 84 | 91 | 94 | 0.5 |
| 533235 | 28 | 49 | 69 | 82 | 90 | 1.4 |

TABLE 166

| | | | | | 10.00 | IC₅₀ |
|---|---|---|---|---|---|---|
| ISIS No | 0.625 μM | 1.250 μM | 2.50 μM | 5.00 μM | μM | (μM) |
| 533256 | 47 | 72 | 86 | 90 | 94 | <0.6 |
| 533257 | 63 | 77 | 88 | 91 | 96 | <0.6 |
| 533258 | 66 | 81 | 88 | 95 | 95 | <0.6 |
| 533259 | 48 | 70 | 84 | 90 | 93 | <0.6 |
| 533262 | 44 | 66 | 79 | 90 | 96 | 0.7 |
| 533265 | 59 | 74 | 85 | 93 | 96 | <0.6 |
| 533269 | 25 | 55 | 74 | 86 | 87 | 1.2 |
| 533270 | 34 | 59 | 73 | 86 | 95 | 1.0 |
| 533271 | 63 | 82 | 88 | 92 | 92 | <0.6 |
| 533291 | 14 | 46 | 64 | 84 | 89 | 1.8 |
| 533301 | 49 | 61 | 75 | 83 | 91 | 0.6 |
| 533315 | 22 | 39 | 73 | 76 | 91 | 1.7 |
| 533317 | 26 | 53 | 68 | 85 | 94 | 1.3 |
| 533318 | 29 | 40 | 46 | 77 | 91 | 1.9 |

TABLE 167

| | | | | | 10.00 | IC₅₀ |
|---|---|---|---|---|---|---|
| ISIS No | 0.625 μM | 1.250 μM | 2.50 μM | 5.00 μM | μM | (μM) |
| 533280 | 58 | 64 | 77 | 82 | 87 | 0.3 |
| 533316 | 35 | 55 | 68 | 87 | 91 | 1.1 |
| 533326 | 34 | 68 | 76 | 89 | 96 | 0.8 |
| 533328 | 54 | 55 | 79 | 83 | 92 | 0.5 |
| 533329 | 46 | 62 | 72 | 83 | 95 | 0.7 |
| 533330 | 56 | 75 | 83 | 91 | 94 | 0.3 |
| 533331 | 54 | 61 | 80 | 86 | 89 | 0.4 |
| 533352 | 54 | 62 | 79 | 83 | 89 | 0.4 |
| 533364 | 52 | 73 | 83 | 91 | 94 | 0.4 |
| 533898 | 17 | 47 | 63 | 78 | 87 | 1.8 |
| 533908 | 35 | 58 | 74 | 82 | 87 | 1 |
| 533916 | 22 | 46 | 72 | 78 | 88 | 1.6 |
| 533932 | 51 | 62 | 70 | 79 | 80 | 0.5 |
| 533937 | 20 | 40 | 61 | 79 | 85 | 1.9 |

### Example 118: Dose-Dependent Antisense Inhibition of Human GHR in Hep3B Cells by MOE Gapmers

[1121] Gapmers from studies described above exhibiting significant in vitro inhibition of GHR mRNA were selected and tested at various doses in Hep3B cells. The antisense oligonucleotides were tested in a series of experiments that had similar culture conditions. The results for each experiment are presented in separate tables shown below. Cells were plated at a density of 20,000 cells per well and transfected using electroporation with 0.3125 μM, 0.625 μM, 1.25 μM, 2.50 μM, 5.00 μM and 10.00 μM concentrations of antisense oligonucleotide, as specified in the Tables below. After a treatment period of approximately 16 hours, RNA was isolated from the cells and GHR mRNA levels were measured by quantitative real-time PCR. Human primer probe set RTS3437_MGB was used to measure mRNA levels. GHR mRNA levels were adjusted according to total RNA content, as measured by RIBOGREEN®. Results are presented as percent inhibition of GHR, relative to untreated control cells.

[1122] The half maximal inhibitory concentration (IC₅₀) of each oligonucleotide is also presented. GHR mRNA levels were significantly reduced in a dose-dependent manner in antisense oligonucleotide treated cells.

TABLE 168

| | | | 1.250 | 2.50 | 5.00 | 10.00 | IC₅₀ |
|---|---|---|---|---|---|---|---|
| ISIS No | 0.3125 μM | 0.625 μM | μM | μM | μM | μM | (μM) |
| 523577 | 0 | 16 | 33 | 59 | 72 | 94 | 2.2 |
| 523633 | 15 | 33 | 66 | 73 | 82 | 86 | 1.1 |
| 523764 | 11 | 33 | 50 | 68 | 78 | 83 | 1.5 |
| 523794 | 12 | 30 | 33 | 56 | 76 | 82 | 1.9 |
| 523805 | 21 | 48 | 66 | 78 | 85 | 92 | 0.8 |
| 523810 | 18 | 36 | 61 | 80 | 89 | 90 | 1.0 |
| 523814 | 13 | 35 | 52 | 67 | 81 | 88 | 1.3 |
| 523819 | 11 | 30 | 57 | 72 | 81 | 89 | 1.3 |
| 523820 | 0 | 15 | 43 | 61 | 84 | 92 | 1.8 |
| 523824 | 21 | 27 | 59 | 72 | 84 | 90 | 1.2 |

TABLE 169

| | | | 1.250 | 2.50 | 5.00 | 10.00 | IC₅₀ |
|---|---|---|---|---|---|---|---|
| ISIS No | 0.3125 μM | 0.625 μM | μM | μM | μM | μM | (μM) |
| 539302 | 34 | 41 | 56 | 83 | 83 | 96 | 0.8 |
| 539321 | 30 | 32 | 76 | 73 | 80 | 94 | 0.8 |
| 539322 | 22 | 36 | 57 | 72 | 78 | 94 | 1.1 |
| 539355 | 23 | 42 | 48 | 72 | 71 | 88 | 1.2 |
| 539359 | 21 | 38 | 48 | 73 | 78 | 92 | 1.2 |
| 539320 | 14 | 32 | 53 | 72 | 82 | 91 | 1.3 |
| 539341 | 3 | 19 | 35 | 56 | 78 | 89 | 2.0 |
| 539342 | 6 | 18 | 33 | 51 | 70 | 83 | 2.3 |
| 539356 | 0 | 0 | 21 | 45 | 73 | 94 | 2.7 |
| 539358 | 0 | 15 | 23 | 50 | 52 | 91 | 2.9 |

TABLE 170

| | 0.3125 | 0.625 | 1.250 | 2.50 | 5.00 | 10.00 | IC₅₀ |
|---|---|---|---|---|---|---|---|
| ISIS No | μM | μM | μM | μM | μM | μM | (μM) |
| 539339 | 22 | 37 | 52 | 77 | 90 | 92 | 1.0 |
| 539360 | 28 | 49 | 72 | 82 | 95 | 97 | 0.7 |
| 539361 | 36 | 56 | 75 | 86 | 95 | 98 | 0.5 |
| 539362 | 24 | 26 | 63 | 77 | 91 | 97 | 1.0 |
| 539375 | 21 | 29 | 39 | 63 | 77 | 91 | 1.5 |
| 539378 | 8 | 42 | 64 | 85 | 92 | 97 | 1.0 |
| 539379 | 43 | 59 | 80 | 89 | 96 | 98 | 0.3 |
| 539380 | 61 | 73 | 90 | 95 | 98 | 98 | 0.1 |
| 539383 | 30 | 49 | 75 | 87 | 97 | 98 | 0.6 |
| 539403 | 48 | 55 | 75 | 85 | 94 | 96 | 0.3 |
| 539432 | 36 | 42 | 69 | 79 | 88 | 95 | 0.7 |

TABLE 171

| | 0.3125 | 0.625 | 1.250 | 2.50 | 5.00 | 10.00 | IC₅₀ |
|---|---|---|---|---|---|---|---|
| ISIS No | μM | μM | μM | μM | μM | μM | (μM) |
| 539376 | 34 | 46 | 62 | 82 | 94 | 98 | 0.7 |
| 539389 | 53 | 58 | 78 | 86 | 94 | 97 | 0.2 |
| 539392 | 1 | 19 | 26 | 68 | 81 | 94 | 1.9 |
| 539399 | 27 | 52 | 65 | 78 | 92 | 98 | 0.7 |
| 539400 | 7 | 26 | 43 | 59 | 88 | 95 | 1.6 |
| 539401 | 32 | 39 | 77 | 90 | 92 | 95 | 0.6 |
| 539404 | 22 | 59 | 77 | 87 | 93 | 95 | 0.6 |
| 539413 | 16 | 33 | 53 | 82 | 86 | 96 | 1.1 |
| 539415 | 4 | 44 | 56 | 74 | 81 | 94 | 1.2 |
| 539416 | 37 | 61 | 70 | 85 | 92 | 95 | 0.4 |
| 539433 | 31 | 52 | 70 | 85 | 87 | 94 | 0.6 |

### Example 119: Antisense Inhibition of Human Growth Hormone Receptor in Hep3B Cells by Deoxy, MOE and (S)-cEt Gapmers

[1123] Additional antisense oligonucleotides were designed targeting a growth hormone receptor (GHR) nucleic acid and were tested for their effects on GHR mRNA in vitro. The antisense oligonucleotides were tested in a series of experiments that had similar culture conditions. The results for each experiment are presented in separate tables shown below. Cultured Hep3B cells at a density of 20,000 cells per well were transfected using electroporation with 5,000 nM antisense oligonucleotide. After a treatment period of approximately 24 hours, RNA was isolated from the cells and GHR mRNA levels were measured by quantitative real-time PCR. Human primer probe set RTS3437_MGB was used to measure mRNA levels. GHR mRNA levels were adjusted according to total RNA content, as measured by RIBOGREEN®. Results are presented as percent inhibition of GHR, relative to untreated control cells.

[1124] The newly designed chimeric antisense oligonucleotides in the Tables below were designed as deoxy, MOE, and (S)-cEt gapmers. The deoxy, MOE and (S)-cEt oligonucleotides are 16 nucleosides in length wherein the nucleoside have either a MOE sugar modification, an (S)-cEt sugar modification, or a deoxy modification. The ‘Chemistry’ column describes the sugar modifications of each oligonucleotide. ‘k’ indicates an (S)-cEt sugar modification; indicates deoxyribose; and ‘e’ indicates a MOE modification. The internucleoside linkages throughout each gapmer are phosphorothioate (P═S) linkages. All cytosine residues throughout each gapmer are 5-methylcytosines. “Start site” indicates the 5′-most nucleoside to which the gapmer is targeted in the human gene sequence. “Stop site” indicates the 3′-most nucleoside to which the gapmer is targeted human gene sequence. Each gapmer listed in the Tables below is targeted to either the human GHR mRNA, designated herein as SEQ ID NO: 1 (GENBANK Accession No. NM_000163.4) or the human GHR genomic sequence, designated herein as SEQ ID NO: 2 (GENBANK Accession No. NT_006576.16 truncated from nucleotides 42411001 to 42714000). ‘n/a’ indicates that the antisense oligonucleotide does not target that particular gene sequence with 100% complementarity. In case the sequence alignment for a target gene in a particular table is not shown, it is understood that none of the oligonucleotides presented in that table align with 100% complementarity with that target gene.

TABLE 172
Inhibition of GHR mRNA by deoxy, MOE and (S)-cEt gapmers targeting
intronic and exonic regions of SEQ ID NO: 1 and 2

| | SEQ | | | | | SEQ | |
|---|---|---|---|---|---|---|---|
| | ID | | | | | ID | |
| | NO: 1 | | | | | NO: 2 | SEQ |
| ISIS | Start | | | | % | Start | ID |
| NO | Site | Target Region | Sequence | Chemistry | inhibition | Site | NO |
| 541262 | n/a | Intron 2 | TTGGTTTGTCAATCCT | eekddddddddddkke | 84 | 156891 | 1370 |
| 541263 | 164 | Intron 1 | CCGAGCTTCGCCTCTG | eekddddddddddkke | 89 | 3040 | 1371 |
| 541264 | 167 | Intron 1 | CCTCCGAGCTTCGCCT | eekddddddddddkke | 90 | 3043 | 1372 |
| 541265 | 170 | Junction | GGACCTCCGAGCTTCG | eekddddddddddkke | 89 | n/a | 1373 |
| | | spanning two | | | | | |
| | | exons | | | | | |
| 541266 | 176 | Junction | CCTGTAGGACCTCCGA | eekddddddddddkke | 83 | n/a | 1374 |
| | | spanning two | | | | | |
| | | exons | | | | | |
| 541268 | 214 | Exon 2 | CCAGTGCCAAGGTCAA | eekddddddddddkke | 87 | 144998 | 1375 |
| 541269 | 226 | Exon 2 | CACTTGATCCTGCCAG | eekddddddddddkke | 67 | 145010 | 1376 |
| 541270 | 244 | Exon 2 | CACTTCCAGAAAAAGC | eekddddddddddkke | 34 | 145028 | 1377 |
| 541278 | 365 | Exon 4/Intron 3 | GTCTCTCGCTCAGGTG | eekddddddddddkke | 77 | 268028 | 1378 |
| 541279 | 368 | Exon 4/Intron 3 | AAAGTCTCTCGCTCAG | eekddddddddddkke | 76 | 268031 | 1379 |
| 541280 | 373 | Exon 4/Intron 3 | ATGAAAAAGTCTCTCG | eekddddddddddkke | 66 | 268036 | 1380 |
| 541283 | 445 | exon 2-exon 3 | TCCTTCTGGTATAGAA | eekddddddddddkke | 37 | n/a | 1381 |
| | | junction | | | | | |
| 541288 | 554 | Exon 5 | CAATAAGGTATCCAGA | eekddddddddddkke | 49 | 274114 | 1382 |
| 541289 | 561 | Exon 5 | CTTGATACAATAAGGT | eekddddddddddkke | 66 | 274121 | 1383 |
| 541290 | 569 | Exon 5 | CTAGTTAGCTTGATAC | eekddddddddddkke | 61 | 274129 | 1384 |
| 541293 | 628 | exon 3-exon 4 | GATCTGGTTGCACTAT | eekddddddddddkke | 57 | n/a | 1385 |
| | | junction | | | | | |
| 541294 | 639 | Exon 6 | GGCAATGGGTGGATCT | eekddddddddddkke | 38 | 278933 | 1386 |
| 541295 | 648 | Exon 6 | CCAGTTGAGGGCAATG | eekddddddddddkke | 67 | 278942 | 1387 |
| 541296 | 654 | Exon 6 | TAAAGTCCAGTTGAGG | eekddddddddddkke | 43 | 278948 | 1388 |
| 541301 | 924 | Exon 7 | TACATAGAGCACCTCA | eekddddddddddkke | 86 | 290422 | 1389 |
| 541302 | 927 | Exon 7 | TGTTACATAGAGCACC | eekddddddddddkke | 78 | 290425 | 1390 |
| 541303 | 930 | Exon 7 | AAGTGTTACATAGAGC | eekddddddddddkke | 59 | 290428 | 1391 |
| 541304 | 958 | Exon 7 | CTTCACATGTAAATTG | eekddddddddddkke | 26 | 290456 | 1392 |
| 541305 | 981 | Exon 8 | GAGCCATGGAAAGTAG | eekddddddddddkke | 66 | 292535 | 1393 |
| 541310 | 1127 | Exon 7-exon 8 | CCTTCCTTGAGGAGAT | eekddddddddddkke | 26 | n/a | 1394 |
| | | junction | | | | | |
| 541320 | 1317 | Exon 10 | CTTCACCCCTAGGTTA | eekddddddddddkke | 38 | 297734 | 1395 |
| 541321 | 1322 | Exon 10 | CCATCCTTCACCCCTA | eekddddddddddkke | 81 | 297739 | 1396 |
| 541322 | 1326 | Exon 10 | GTCGCCATCCTTCACC | eekddddddddddkke | 79 | 297743 | 1397 |
| 541323 | 1331 | Exon 10 | CCAGAGTCGCCATCCT | eekddddddddddkke | 64 | 297748 | 1398 |
| 541325 | 1420 | Exon 10 | GTGGCTGAGCAACCTC | eekddddddddddkke | 79 | 297837 | 1399 |
| 541326 | 1434 | Exon 10 | CCCTTTTAACCTCTGT | eekddddddddddkke | 67 | 297851 | 1400 |
| 541331 | 1492 | Exon 10 | CATCATGATAAGGTGA | eekddddddddddkke | 16 | 297909 | 1401 |
| 541332 | 1526 | Exon 10 | TGGATAACACTGGGCT | eekddddddddddkke | 30 | 297943 | 1402 |
| 541333 | 1532 | Exon 10 | TCTGCTTGGATAACAC | eekddddddddddkke | 63 | 297949 | 1403 |
| 541335 | 1597 | Exon 10 | GAATATGGGCAGCTTG | eekddddddddddkke | 33 | 298014 | 1404 |
| 541336 | 1601 | Exon 10 | AGCTGAATATGGGCAG | eekddddddddddkke | 34 | 298018 | 1405 |
| 541337 | 1607 | Exon 10 | TTGCTTAGCTGAATAT | eekddddddddddkke | 39 | 298024 | 1406 |
| 541338 | 1611 | Exon 10 | TGGATTGCTTAGCTGA | eekddddddddddkke | 79 | 298028 | 1407 |
| 541339 | 1614 | Exon 10 | ACTTGGATTGCTTAGC | eekddddddddddkke | 73 | 298031 | 1408 |

### Example 120: Antisense Inhibition of Human Growth Hormone Receptor in Hep3B Cells by Deoxy, MOE and (S)-cEt Gapmers

[1125] Additional antisense oligonucleotides were designed targeting a growth hormone receptor (GHR) nucleic acid and were tested for their effects on GHR mRNA in vitro. The antisense oligonucleotides were tested in a series of experiments that had similar culture conditions. The results for each experiment are presented in separate tables shown below. Cultured Hep3B cells at a density of 20,000 cells per well were transfected using electroporation with 4,500 nM antisense oligonucleotide. After a treatment period of approximately 24 hours, RNA was isolated from the cells and GHR mRNA levels were measured by quantitative real-time PCR. Human primer probe set RTS3437_MGB was used to measure mRNA levels. GHR mRNA levels were adjusted according to total RNA content, as measured by RIBOGREEN®. Results are presented as percent inhibition of GHR, relative to untreated control cells.

[1126] The newly designed chimeric antisense oligonucleotides in the Tables below were designed as deoxy, MOE, and (S)-cEt gapmers. The deoxy, MOE and (S)-cEt oligonucleotides are 16 nucleosides in length wherein the nucleoside have either a MOE sugar modification, an (S)-cEt sugar modification, or a deoxy modification. The ‘Chemistry’ column describes the sugar modifications of each oligonucleotide. ‘k’ indicates an (S)-cEt sugar modification; ‘d’ indicates deoxyribose; and ‘e’ indicates a MOE modification. The internucleoside linkages throughout each gapmer are phosphorothioate (P═S) linkages. All cytosine residues throughout each gapmer are 5-methylcytosines. “Start site” indicates the 5′-most nucleoside to which the gapmer is targeted in the human gene sequence. “Stop site” indicates the 3′-most nucleoside to which the gapmer is targeted human gene sequence. Each gapmer listed in the Tables below is targeted to either the human GHR mRNA, designated herein as SEQ ID NO: 1 (GENBANK Accession No. NM_000163.4) or the human GHR genomic sequence, designated herein as SEQ ID NO: 2 (GENBANK Accession No. NT_006576.16 truncated from nucleotides 42411001 to 42714000). ‘n/a’ indicates that the antisense oligonucleotide does not target that particular gene sequence with 100% complementarity. In case the sequence alignment for a target gene in a particular table is not shown, it is understood that none of the oligonucleotides presented in that table align with 100% complementarity with that target gene. The oligonucleotides of Table 175 do not target SEQ ID NOs: 1 or 2, but instead target variant gene sequences SEQ ID NO: 4 (GENBANK Accession No. DR006395.1) or SEQ ID NO: 7 (the complement of GENBANK Accession No. AA398260.1).

TABLE 173
Inhibition of GHR mRNA by deoxy, MOE and (S)-cEt gapmers targeting
intronic and exonic regions of SEQ ID NO: 1 and 2

| | SEQ | | | | | SEQ | |
|---|---|---|---|---|---|---|---|
| | ID | | | | | ID | |
| | NO: 1 | | | | | NO: 2 | |
| ISIS | Start | Target | | | % | Start | SEQ ID |
| NO | Site | Region | Sequence | Chemistry | inhibition | Site | NO |
| 541262 | n/a | Intron 2 | TTGGTTTGTCAATCCT | eekddddddddddkke | 86 | 156891 | 1370 |
| 541340 | 1619 | Exon 10 | AGTGAACTTGGATTGC | eekddddddddddkke | 73 | 298036 | 1409 |
| 541341 | 1641 | Exon 10 | GGCATAAAAGTCGATG | eekddddddddddkke | 41 | 298058 | 1410 |
| 541342 | 1644 | Exon 10 | CTGGGCATAAAAGTCG | eekddddddddddkke | 33 | 298061 | 1411 |
| 541343 | 1683 | Exon 10 | GGAAAGGACCACACTA | eekddddddddddkke | 34 | 298100 | 1412 |
| 541344 | 1746 | Exon 10 | GAGTGAGACCATTTCC | eekddddddddddkke | 65 | 298163 | 1413 |
| 541345 | 1827 | Exon 10 | GATGTGAGGAGCCACA | eekddddddddddkke | 54 | 298244 | 1414 |
| 541346 | 1830 | Exon 10 | CTTGATGTGAGGAGCC | eekddddddddddkke | 70 | 298247 | 1415 |
| 541347 | 1835 | Exon 10 | TCAACCTTGATGTGAG | eekddddddddddkke | 38 | 298252 | 1416 |
| 541348 | 1839 | Exon 10 | TGATTCAACCTTGATG | eekddddddddddkke | 39 | 298256 | 1417 |
| 541349 | 1842 | Exon 10 | GTGTGATTCAACCTTG | eekddddddddddkke | 74 | 298259 | 1418 |
| 541350 | 1845 | Exon 10 | TATGTGTGATTCAACC | eekddddddddddkke | 58 | 298262 | 1419 |
| 541351 | 1949 | Exon 10 | GGCATCTCAGAACCTG | eekddddddddddkke | 41 | 298366 | 1420 |
| 541352 | 1965 | Exon 10 | GGTATAGTCTGGGACA | eekddddddddddkke | 18 | 298382 | 1421 |
| 541353 | 1969 | Exon 10 | TGGAGGTATAGTCTGG | eekddddddddddkke | 17 | 298386 | 1422 |
| 541354 | 1972 | Exon 10 | GAATGGAGGTATAGTC | eekddddddddddkke | 0 | 298389 | 1423 |
| 541355 | 1975 | Exon 10 | TATGAATGGAGGTATA | eekddddddddddkke | 0 | 298392 | 1424 |
| 541356 | 1978 | Exon 10 | CTATATGAATGGAGGT | eekddddddddddkke | 30 | 298395 | 1425 |
| 541357 | 1981 | Exon 10 | GTACTATATGAATGGA | eekddddddddddkke | 43 | 298398 | 1426 |
| 541358 | 1987 | Exon 10 | GGGACTGTACTATATG | eekddddddddddkke | 12 | 298404 | 1427 |
| 541369 | 2306 | Exon 10 | TTACATTGCACAATAG | eekddddddddddkke | 21 | 298723 | 1428 |
| 541373 | 2667 | Exon 10 | TAGCCATGCTTGAAGT | eekddddddddddkke | 34 | 299084 | 1429 |
| 541374 | 2686 | Exon 10 | TGTGTAGTGTAATATA | eekddddddddddkke | 10 | 299103 | 1430 |
| 541375 | 2690 | Exon 10 | ACAGTGTGTAGTGTAA | eekddddddddddkke | 82 | 299107 | 1431 |
| 541376 | 2697 | Exon 10 | GCAGTACACAGTGTGT | eekddddddddddkke | 46 | 299114 | 1432 |
| 541377 | 2700 | Exon 10 | ACTGCAGTACACAGTG | eekddddddddddkke | 32 | 299117 | 1433 |
| 541378 | 2740 | Exon 10 | TTAGACTGTAGTTGCT | eekddddddddddkke | 25 | 299157 | 1434 |
| 541379 | 2746 | Exon 10 | CCAGCTTTAGACTGTA | eekddddddddddkke | 69 | 299163 | 1435 |
| 541380 | 2750 | Exon 10 | TAAACCAGCTTTAGAC | eekddddddddddkke | 20 | 299167 | 1436 |
| 541381 | 2755 | Exon 10 | AACATTAAACCAGCTT | eekddddddddddkke | 64 | 299172 | 1437 |
| 541382 | 2849 | Exon 10 | ACTACAATCATTTTAG | eekddddddddddkke | 0 | 299266 | 1438 |
| 541383 | 2853 | Exon 10 | GATTACTACAATCATT | eekddddddddddkke | 0 | 299270 | 1439 |
| 541384 | 2859 | Exon 10 | AATGCAGATTACTACA | eekddddddddddkke | 46 | 299276 | 1440 |
| 541385 | 2865 | Exon 10 | TCCAATAATGCAGATT | eekddddddddddkke | 52 | 299282 | 1441 |
| 541386 | 2941 | Exon 10 | GTTGATCTGTGCAAAC | eekddddddddddkke | 74 | 299358 | 1442 |
| 541389 | 3037 | Exon 10 | TCTACTTCTCTTAGCA | eekddddddddddkke | 50 | 299454 | 1443 |
| 541393 | 3215 | Exon 10 | GCTTCTTGTACCTTAT | eekddddddddddkke | 84 | 299632 | 1444 |
| 541394 | 3237 | Exon 10 | GATTTGCTTCAACTTA | eekddddddddddkke | 47 | 299654 | 1445 |
| 541395 | 3305 | Exon 10 | GGTTATAGGCTGTGAA | eekddddddddddkke | 0 | 299722 | 1446 |
| 541396 | 3308 | Exon 10 | TCTGGTTATAGGCTGT | eekddddddddddkke | 88 | 299725 | 1447 |
| 541397 | 3311 | Exon 10 | GTGTCTGGTTATAGGC | eekddddddddddkke | 56 | 299728 | 1448 |
| 541398 | 3316 | Exon 10 | AGTATGTGTCTGGTTA | eekddddddddddkke | 76 | 299733 | 1449 |
| 541399 | 3371 | Exon 10 | GGGACTGAAAACCTTG | eekddddddddddkke | 50 | 299788 | 1450 |
| 541400 | 3975 | Exon 10 | AGTATTCTTCACTGAG | eekddddddddddkke | 36 | 300392 | 1451 |
| 541401 | 4044 | Exon 10 | GCGATAAATGGGAAAT | eekddddddddddkke | 36 | 300461 | 1452 |
| 541402 | 4048 | Exon 10 | GTCTGCGATAAATGGG | eekddddddddddkke | 52 | 300465 | 1453 |
| 541403 | 4058 | Exon 10 | CCTAAAAAAGGTCTGC | eekddddddddddkke | 51 | 300475 | 1454 |
| 541404 | 4072 | Exon 10 | CATTAAGCTTGCTTCC | eekddddddddddkke | 53 | 300489 | 1455 |

TABLE 174
Inhibition of GHR mRNA by deoxy, MOE and (S)-cEt gapmers
targeting intronic and exonic regions of SEQ ID NO: 1 and 2

| | SEQ | | | | | SEQ | |
|---|---|---|---|---|---|---|---|
| | ID | | | | | ID | |
| | NO: 1 | | | | | NO: 2 | SEQ |
| ISIS | Start | | | | % | Start | ID |
| NO | Site | Target Region | Sequence | Chemistry | inhibition | Site | NO |
| 541262 | n/a | Intron 2 | TTGGTTTGTCAATCCT | eekddddddddddkke | 85 | 156891 | 1370 |
| 541421 | 4418 | Exon 10 | CACAACTAGTCATACT | eekddddddddddkke | 42 | 300835 | 1456 |
| 541422 | 4428 | Exon 10 | AACTGCCAGACACAAC | eekddddddddddkke | 68 | 300845 | 1457 |
| 541423 | 4431 | Exon 10 | ATAAACTGCCAGACAC | eekddddddddddkke | 86 | 300848 | 1458 |
| 541424 | 4503 | Exon 10 | TATCAGGAATCCAAGA | eekddddddddddkke | 11 | 300920 | 1459 |
| 541425 | 4521 | Exon 10 | TTGATAACAGAAGCAC | eekddddddddddkke | 16 | 300938 | 1460 |
| 541426 | 4528 | Exon 10 | TTGGTGTTTGATAACA | eekddddddddddkke | 31 | 300945 | 1461 |
| 541427 | 4531 | Exon 10 | ATGTTGGTGTTTGATA | eekddddddddddkke | 32 | 300948 | 1462 |
| 541429 | 30 | Exon 1 | CCGCCACTGTAGCAGC | eekddddddddddkke | 77 | 2906 | 1463 |
| 541430 | 35 | Exon 1 | CGCCACCGCCACTGTA | eekddddddddddkke | 88 | 2911 | 1464 |
| 541431 | 63 | Exon 1 | GCCGCCCGGGCTCAGC | eekddddddddddkke | 86 | 2939 | 1465 |
| 541432 | 67 | Exon 1 | CGCCGCCGCCCGGGCT | eekddddddddddkke | 61 | 2943 | 1466 |
| 541433 | 144 | Exon 1 | GAGAGCGCGGGTTCGC | eekddddddddddkke | 57 | 3020 | 1467 |
| 541434 | n/a | Exon 1/Intron 1 | CTACTGACCCCAGTTC | eekddddddddddkke | 80 | 3655 | 1468 |
| 541435 | n/a | Exon 1/Intron 1 | TCACTCTACTGACCCC | eekddddddddddkke | 90 | 3660 | 1469 |
| 541436 | n/a | Exon 1/Intron 1 | TCATGCGGACTGGTGG | eekddddddddddkke | 56 | 3679 | 1470 |
| 541437 | n/a | Exon 3/Intron 3 | ATGTGAGCATGGACCC | eekddddddddddkke | 82 | 225438 | 1471 |
| 541438 | n/a | Exon 3/Intron 3 | TCTTGATATGTGAGCA | eekddddddddddkke | 93 | 225445 | 1472 |
| 541439 | n/a | Exon 3/Intron 3 | TTCAAGTTGGTGAGCT | eekddddddddddkke | 72 | 226788 | 1473 |
| 541440 | n/a | Exon 3/Intron 3 | TGCTTCCTTCAAGTTG | eekddddddddddkke | 68 | 226795 | 1474 |
| 541441 | n/a | Exon 3/Intron 3 | TGTAATTTCATTCATG | eekddddddddddkke | 62 | 226809 | 1475 |
| 541442 | n/a | Exon 3/Intron 3 | CCTTTTGCCAAGAGCA | eekddddddddddkke | 85 | 226876 | 1476 |
| 541443 | n/a | Exon 3/Intron 3 | GATCCTTTTGCCAAGA | eekddddddddddkke | 77 | 226879 | 1477 |
| 541444 | n/a | Exon 3/Intron 3 | GCTAGTAATGTTACAT | eekddddddddddkke | 68 | 238331 | 1478 |
| 541445 | n/a | Exon 3/Intron 3 | GCAACTTGCTAGTAAT | eekddddddddddkke | 65 | 238338 | 1479 |
| 541446 | n/a | Exon 3/Intron 3 | TGTGCAACTTGCTAGT | eekddddddddddkke | 44 | 238341 | 1480 |
| 541447 | n/a | Exon 3/Intron 3 | GGATTTCAGTTTGAAT | eekddddddddddkke | 0 | 238363 | 1481 |
| 541448 | n/a | Exon 3/Intron 3 | CTCAGAGCCTTGGTAG | eekddddddddddkke | 65 | 238428 | 1482 |
| 541449 | n/a | Exon 1/Intron 1 | CAAACGCGCAAAAGAC | eekddddddddddkke | 1 | 3608 | 1483 |
| 541450 | n/a | Exon 1/Intron 1 | GCCCGCACAAACGCGC | eekddddddddddkke | 11 | 3615 | 1484 |
| 541451 | n/a | Exon 1/Intron 1 | GGTTAAAGAAGTTGCT | eekddddddddddkke | 60 | 93190 | 1485 |
| 541452 | n/a | Exon 1/Intron 1 | CCCAGTGAATTCAGCA | eekddddddddddkke | 85 | 93245 | 1486 |
| 541453 | n/a | Exon 1/Intron 1 | GCGCCCAGTGAATTCA | eekddddddddddkke | 74 | 93248 | 1487 |
| 541454 | n/a | Exon 1/Intron 1 | AAGATGCGCCCAGTGA | eekddddddddddkke | 71 | 93253 | 1488 |
| 541455 | n/a | Exon 1/Intron 1 | TGTAAGATGCGCCCAG | eekddddddddddkke | 75 | 93256 | 1489 |
| 541456 | n/a | Exon 1/Intron 1 | AATTACTTGTAAGATG | eekddddddddddkke | 15 | 93263 | 1490 |
| 541457 | n/a | Exon 1/Intron 1 | CCCAGAAGGCACTTGT | eekddddddddddkke | 61 | 93302 | 1491 |
| 541458 | n/a | Exon 1/Intron 1 | TTGCAGAACAAATCTT | eekddddddddddkke | 3 | 93333 | 1492 |
| 541459 | n/a | Exon 1/Intron 1 | CATGGAAGATTTGCAG | eekddddddddddkke | 17 | 93343 | 1493 |
| 541460 | n/a | Exon 1/Intron 1 | GGTCATGGAAGATTTG | eekddddddddddkke | 57 | 93346 | 1494 |
| 541461 | n/a | Exon 1/Intron 1 | GACCTTGGTCATGGAA | eekddddddddddkke | 51 | 93352 | 1495 |
| 541462 | n/a | Exon 1/Intron 1 | TGCCAATCCAAAGAGG | eekddddddddddkke | 34 | 93369 | 1496 |
| 541463 | n/a | Exon 1/Intron 1 | GGGTCTGCCAATCCAA | eekddddddddddkke | 67 | 93374 | 1497 |
| 541464 | n/a | Exon 1/Intron 1 | TCCCTGGGTCTGCCAA | eekddddddddddkke | 82 | 93379 | 1498 |
| 541465 | n/a | Exon 1/Intron 1 | AAGTGTGAATTTATCT | eekddddddddddkke | 16 | 93408 | 1499 |
| 541466 | n/a | Exon 1/Intron 1 | GGAGATCTCAACAAGG | eekddddddddddkke | 38 | 93428 | 1500 |
| 541468 | n/a | Exon 1/Intron 1 | TCGCCCATCACTCTTC | eekddddddddddkke | 43 | 93989 | 1501 |
| 541469 | n/a | Exon 1/Intron 1 | CCTGTCGCCCATCACT | eekddddddddddkke | 61 | 93993 | 1502 |
| 541470 | n/a | Exon 1/Intron 1 | TCACCTGTCGCCCATC | eekddddddddddkke | 70 | 93996 | 1503 |
| 541471 | n/a | Exon 1/Intron 1 | CCATCACCTGTCGCCC | eekddddddddddkke | 89 | 93999 | 1504 |
| 541472 | n/a | Exon 1/Intron 1 | TCACCATCACCTGTCG | eekddddddddddkke | 72 | 94002 | 1505 |
| 541473 | n/a | Exon 1/Intron 1 | TAATAGTTGTCACCAT | eekddddddddddkke | 42 | 94011 | 1506 |
| 541474 | n/a | Exon 1/Intron 1 | TTCAGATCTTATTAAT | eekddddddddddkke | 0 | 94023 | 1507 |
| 541475 | n/a | Exon 1/Intron 1 | TTGCAAATTCAGTCTG | eekddddddddddkke | 32 | 94096 | 1508 |
| 541477 | n/a | Exon 2/Intron 2 | CGTTCTCTTGGAAGTA | eekddddddddddkke | 78 | 198766 | 1509 |
| 541478 | n/a | Exon 2/Intron 2 | TCTTGAATAAATTTCG | eekddddddddddkke | 25 | 198780 | 1510 |
| 541479 | n/a | Exon 2/Intron 2 | AAGCTCACTCTTCAAT | eekddddddddddkke | 60 | 198810 | 1511 |
| 541480 | n/a | Exon 2/Intron 2 | TCCAAGCTCACTCTTC | eekddddddddddkke | 49 | 198813 | 1512 |
| 541481 | n/a | Exon 2/Intron 2 | GCTCCTGCCACTCTGT | eekddddddddddkke | 75 | 198837 | 1513 |
| 541482 | n/a | Exon 2/Intron 2 | ATGGGCAAAGGCATCT | eekddddddddddkke | 60 | 198874 | 1514 |
| 541483 | n/a | 5′ UTR | AGTCTTCCCGGCGAGG | eekddddddddddkke | 32 | 2571 | 1515 |
| 541484 | n/a | 5′ and overlappig | CCGCCGCTCCCTAGCC | eekddddddddddkke | 73 | 2867 | 1516 |
| | | with exon 1 | | | | | |
| 541485 | n/a | Intron 1 | GCCCGCAACTCCCTGC | eekddddddddddkke | 37 | 3341 | 1517 |
| 541486 | n/a | Intron 1 | CGCCTCCCCAGGCGCA | eekddddddddddkke | 34 | 4024 | 1518 |
| 541487 | n/a | Intron 1 | GAGTGTCTTCCCAGGC | eekddddddddddkke | 86 | 4446 | 1519 |
| 541488 | n/a | Intron 1 | CTGAAGACTCCTTGAA | eekddddddddddkke | 39 | 4721 | 1520 |
| 541489 | n/a | Intron 1 | GGCTAGCCAAGTTGGA | eekddddddddddkke | 54 | 5392 | 1521 |
| 541490 | n/a | Intron 1 | TGACTCCAGTCTTACC | eekddddddddddkke | 76 | 5802 | 1522 |
| 541491 | n/a | Intron 1 | ATTCATTGTGGTCAGC | eekddddddddddkke | 91 | 6128 | 1523 |
| 541492 | n/a | Intron 1 | GAAGTGGGTTTTTCCC | eekddddddddddkke | 86 | 6543 | 1524 |
| 541493 | n/a | Intron 1 | GCCTTGGTTCAGGTGA | eekddddddddddkke | 79 | 6786 | 1525 |

TABLE 175
Inhibition of GHR mRNA by deoxy, MOE and
(S)-cEt gapmers targeting SEQ ID NO: 4 and 7

| | | Target | | | | |
|---|---|---|---|---|---|---|
| | Target | SEQ | | | % | SEQ |
| ISIS | Start | ID | | Chem- | inhibi- | ID |
| NO | Site | NO | Sequence | istry | tion | NO |
| 541428 | 66 | 4 | CCACTGTA | eekddddd | 92 | 1526 |
| | | | GCAGCCGC | dddddkke | | |
| 541476 | 263 | 7 | TAGGTATT | eekddddd | 80 | 1527 |
| | | | TCAGAGCC | dddddkke | | |

TABLE 176
Inhibition of GHR mRNA by deoxy, MOE and (S)-cEt gapmers
targeting intronic regions of SEQ ID NO: 2

| | SEQ | SEQ | | | | | |
|---|---|---|---|---|---|---|---|
| | ID | ID | | | | | |
| | NO: 1 | NO: 2 | | | | | SEQ |
| ISIS | Start | Start | Target | | | % | ID |
| NO | Site | Site | Region | Sequence | Chemistry | inhibition | NO |
| 541262 | 156891 | 541277 | Intron 2 | TTGGTTTGTCAATCCT | eekddddddddddkke | 80 | 1370 |
| 541494 | 7231 | 541509 | Intron 1 | GTCCAGGCAGAGTTGT | eekddddddddddkke | 30 | 1528 |
| 541495 | 7570 | 541510 | Intron 1 | AGCCAAATGTTGGTCA | eekddddddddddkke | 19 | 1529 |
| 541496 | 8395 | 541511 | Intron 1 | GAGGGCGAGTTTTTCC | eekddddddddddkke | 71 | 1530 |
| 541497 | 9153 | 541512 | Intron 1 | GTGGCATTGGCAAGCC | eekddddddddddkke | 81 | 1531 |
| 541498 | 9554 | 541513 | Intron 1 | ACCCCACTGCACCAAG | eekddddddddddkke | 67 | 1532 |
| 541499 | 9931 | 541514 | Intron 1 | TCCAAGTACTTGCCAA | eekddddddddddkke | 83 | 1533 |
| 541500 | 10549 | 541515 | Intron 1 | AGTGCCTGGCCTAAGG | eekddddddddddkke | 75 | 1534 |
| 541501 | 11020 | 541516 | Intron 1 | GCGCTTCTTCCCTAGG | eekddddddddddkke | 71 | 1535 |
| 541502 | 11793 | 541517 | Intron 1 | CATCTTGCCCAGGGAT | eekddddddddddkke | 84 | 1536 |
| 541503 | 12214 | 541518 | Intron 1 | CCATCTTGCTCCAAGT | eekddddddddddkke | 93 | 1537 |
| 541504 | 12474 | 541519 | Intron 1 | CTTACATCCTGTAGGC | eekddddddddddkke | 71 | 1538 |
| 541505 | 12905 | 541520 | Intron 1 | CGCCTCCTGGTCCTCA | eekddddddddddkke | 97 | 1539 |
| 541506 | 13400 | 541521 | Intron 1 | CCCTATGCACTACCTA | eekddddddddddkke | 49 | 1540 |
| 541507 | 13717 | 541522 | Intron 1 | GAGGGACTGTGGTGCT | eekddddddddddkke | 65 | 1541 |
| 541508 | 14149 | 541523 | Intron 1 | GCCCAATATGTGCCAG | eekddddddddddkke | 60 | 1542 |
| 541509 | 14540 | 541524 | Intron 1 | GCTCTCTCATCGCTGG | eekddddddddddkke | 90 | 1543 |
| 541510 | 15264 | 541525 | Intron 1 | CTCAAGGCTATGTGCC | eekddddddddddkke | 67 | 1544 |
| 541511 | 15849 | 541526 | Intron 1 | TCCACATCCCTCATGT | eekddddddddddkke | 68 | 1545 |
| 541512 | 16530 | 541527 | Intron 1 | AGGACTGAAGGCCCAT | eekddddddddddkke | 49 | 1546 |
| 541513 | 17377 | 541528 | Intron 1 | GTGCGACTTACCAGCT | eekddddddddddkke | 85 | 1547 |
| 541514 | 17581 | 541529 | Intron 1 | TCGCTAAAGCCACACA | eekddddddddddkke | 89 | 1548 |
| 541515 | 17943 | 541530 | Intron 1 | GCTCTGGCTGATGGTC | eekddddddddddkke | 92 | 1549 |
| 541516 | 18353 | 541531 | Intron 1 | TTCCCATGAGGATTTC | eekddddddddddkke | 70 | 1550 |
| 541517 | 18636 | 541532 | Intron 1 | TTGGGCTTAAGCACTA | eekddddddddddkke | 71 | 1551 |
| 541518 | 19256 | 541533 | Intron 1 | GCTAGCACCTAGTCCA | eekddddddddddkke | 71 | 1552 |
| 541519 | 19814 | 541534 | Intron 1 | CCTCTGGCCTACAACA | eekddddddddddkke | 64 | 1553 |
| 541520 | 20365 | 541535 | Intron 1 | ACCCCTCATCAGCACC | eekddddddddddkke | 93 | 1554 |
| 541521 | 20979 | 541536 | Intron 1 | GGCCACCCCTGATCCT | eekddddddddddkke | 66 | 1555 |
| 541522 | 21566 | 541537 | Intron 1 | GAAGCTCCCTTGCCCA | eekddddddddddkke | 96 | 1556 |
| 541523 | 22150 | 541538 | Intron 1 | AGTGTTGCCCCTCCAA | eekddddddddddkke | 83 | 1557 |
| 541524 | 22803 | 541539 | Intron 1 | GGGTCTCCAACCTACT | eekddddddddddkke | 70 | 1558 |
| 541525 | 29049 | 541540 | Intron 1 | GGGATGTAGGTTTACC | eekddddddddddkke | 74 | 1559 |
| 541526 | 29554 | 541541 | Intron 1 | GCAACCGATATCACAG | eekddddddddddkke | 60 | 1560 |
| 541527 | 30245 | 541542 | Intron 1 | TGCCCTGGAACAAATT | eekddddddddddkke | 13 | 1561 |
| 541528 | 30550 | 541543 | Intron 1 | AGTCTAGGAGTAGCTA | eekddddddddddkke | 50 | 1562 |
| 541529 | 30915 | 541544 | Intron 1 | GCTGTTGTCAAGAGAC | eekddddddddddkke | 55 | 1563 |
| 541530 | 31468 | 541545 | Intron 1 | CACCTAGACACTCAGT | eekddddddddddkke | 47 | 1564 |
| 541531 | 32366 | 541546 | Intron 1 | GTCAAGGGATCCCTGC | eekddddddddddkke | 34 | 1565 |
| 541532 | 32897 | 541547 | Intron 1 | TCCCCCTGGCACTCCA | eekddddddddddkke | 79 | 1566 |
| 541533 | 33187 | 541548 | Intron 1 | GCCTGGTAACTCCATT | eekddddddddddkke | 56 | 1567 |
| 541534 | 33780 | 541549 | Intron 1 | GGGCTCACCAACTGTG | eekddddddddddkke | 39 | 1568 |
| 541535 | 34407 | 541550 | Intron 1 | CCACAGGATCATATCA | eekddddddddddkke | 37 | 1569 |
| 541536 | 34846 | 541551 | Intron 1 | CTCCAGCAGAAGTGTC | eekddddddddddkke | 10 | 1570 |
| 541537 | 35669 | 541552 | Intron 1 | AGCCCAACTGTTGCCT | eekddddddddddkke | 79 | 1571 |
| 541538 | 36312 | 541553 | Intron 1 | TGCCAGGCAGTTGCCA | eekddddddddddkke | 75 | 1572 |
| 541539 | 36812 | 541554 | Intron 1 | GCCAGTAAGCACCTTG | eekddddddddddkke | 93 | 1573 |
| 541540 | 37504 | 541555 | Intron 1 | CTAGCTTCCCAGCCCC | eekddddddddddkke | 46 | 1574 |
| 541541 | 38841 | 541556 | Intron 1 | TCAAGCCCAGCTAGCA | eekddddddddddkke | 39 | 1575 |
| 541542 | 39108 | 541557 | Intron 1 | CCTCACAGGCCCTAAT | eekddddddddddkke | 4 | 1576 |
| 541543 | 39408 | 541558 | Intron 1 | ACCTGCTTACATGGTA | eekddddddddddkke | 21 | 1577 |
| 541544 | 40250 | 541559 | Intron 1 | CCTTTGCTAGGACCCA | eekddddddddddkke | 52 | 1578 |
| 541545 | 40706 | 541560 | Intron 1 | GGGACTGCCACCAAGG | eekddddddddddkke | 27 | 1579 |
| 541546 | 40922 | 541561 | Intron 1 | GCTAGATGTTCAGGCC | eekddddddddddkke | 34 | 1580 |
| 541547 | 41424 | 541562 | Intron 1 | CCTATGGCCATGCTGA | eekddddddddddkke | 32 | 1581 |
| 541548 | 41999 | 541563 | Intron 1 | GTATGCTAGTTCCCAT | eekddddddddddkke | 83 | 1582 |
| 541549 | 42481 | 541564 | Intron 1 | CCCTCATAATCTTGGG | eekddddddddddkke | 13 | 1583 |
| 541550 | 42700 | 541565 | Intron 1 | GTCCAACCACTACCAC | eekddddddddddkke | 74 | 1584 |
| 541551 | 43291 | 541566 | Intron 1 | ACTTGCAGATAGCTGA | eekddddddddddkke | 73 | 1585 |
| 541552 | 43500 | 541567 | Intron 1 | GCATGACCCCACTGCC | eekddddddddddkke | 72 | 1586 |
| 541553 | 43947 | 541568 | Intron 1 | GAGGGTCACATTCCCT | eekddddddddddkke | 23 | 1587 |
| 541554 | 44448 | 541569 | Intron 1 | TCTCTTACTGGTGGGT | eekddddddddddkke | 90 | 1588 |
| 541555 | 45162 | 541570 | Intron 1 | GCCCCCTTCCTGGATA | eekddddddddddkke | 28 | 1589 |
| 541556 | 46010 | 541571 | Intron 1 | CCTCATGCGACACCAC | eekddddddddddkke | 71 | 1590 |
| 541557 | 46476 | 541572 | Intron 1 | AGCCCTCTGCCTGTAA | eekddddddddddkke | 67 | 1591 |
| 541558 | 47447 | 541573 | Intron 1 | CTCCCAGCTATAGGCG | eekddddddddddkke | 38 | 1592 |
| 541559 | 47752 | 541574 | Intron 1 | GCTAGCTGCGCAAGGA | eekddddddddddkke | 5 | 1593 |
| 541560 | 48001 | 541575 | Intron 1 | GCGCAGCCCGCTGCAA | eekddddddddddkke | 18 | 1594 |
| 541561 | 48423 | 541576 | Intron 1 | TGCATGATCCACCCCA | eekddddddddddkke | 65 | 1595 |
| 541562 | 50195 | 541577 | Intron 1 | GCTTAGTGCTGGCCCA | eekddddddddddkke | 72 | 1596 |
| 541563 | 50470 | 541578 | Intron 1 | CCTTCCAGTCCTCATA | eekddddddddddkke | 81 | 1597 |
| 541564 | 51104 | 541579 | Intron 1 | ATAGTGTCAAGGCCCA | eekddddddddddkke | 91 | 1598 |
| 541565 | 51756 | 541580 | Intron 1 | AGGCCTTAGTCACCCA | eekddddddddddkke | 88 | 1599 |
| 541566 | 52015 | 541581 | Intron 1 | TAACCAACCTAAGGGA | eekddddddddddkke | 11 | 1600 |
| 541567 | 52230 | 541582 | Intron 1 | ATTCTGGTGATGCCCT | eekddddddddddkke | 66 | 1601 |
| 541568 | 52588 | 541583 | Intron 1 | GTGTTCACTGCCATGA | eekddddddddddkke | 67 | 1602 |
| 541569 | 53532 | 541584 | Intron 1 | GGTAGAGCACACTGCC | eekddddddddddkke | 47 | 1603 |
| 541570 | 54645 | 541585 | Intron 1 | CCACTTTAATGCCACC | eekddddddddddkke | 76 | 1604 |

TABLE 177
Inhibition of GHR mRNA by deoxy, MOE and (S)-cEt gapmers
targeting intronic regions of SEQ ID NO: 2

| | SEQ | SEQ | | | | | |
|---|---|---|---|---|---|---|---|
| | ID | ID | | | | | |
| | NO: 2 | NO: 2 | | | | | |
| ISIS | Start | Stop | Target | | | % | SEQ ID |
| NO | Site | Site | Region | Sequence | Chemistry | inhibition | NO |
| 541262 | 156891 | 156906 | Intron 2 | TTGGTTTGTCAATCCT | eekddddddddddkke | 88 | 1370 |
| 541571 | 54886 | 54901 | Intron 1 | GTCAAATGCTGTTGGG | eekddddddddddkke | 91 | 1605 |
| 541572 | 55900 | 55915 | Intron 1 | CATCCCCTATCAGGGT | eekddddddddddkke | 53 | 1606 |
| 541573 | 62266 | 62281 | Intron 1 | CTCGAATCCCTTGAGC | eekddddddddddkke | 73 | 1607 |
| 541574 | 62733 | 62748 | Intron 1 | GATTCCCTCCCCTAAC | eekddddddddddkke | 27 | 1608 |
| 541575 | 63173 | 63188 | Intron 1 | ATCCATCCATGTGCTG | eekddddddddddkke | 92 | 1609 |
| 541576 | 63751 | 63766 | Intron 1 | GAGCATGCCTCAGTGG | eekddddddddddkke | 81 | 1610 |
| 541577 | 63964 | 63979 | Intron 1 | CAGAAGGACTGCCTCT | eekddddddddddkke | 50 | 1611 |
| 541578 | 64213 | 64228 | Intron 1 | ACAATGCTCAACAGCC | eekddddddddddkke | 75 | 1612 |
| 541579 | 64576 | 64591 | Intron 1 | GTTGGATCTGGCATGC | eekddddddddddkke | 80 | 1613 |
| 541580 | 65027 | 65042 | Intron 1 | CGGCTGAGAGCAAGGG | eekddddddddddkke | 88 | 1614 |
| 541581 | 65363 | 65378 | Intron 1 | GAGAGGGTTCAGCCTG | eekddddddddddkke | 62 | 1615 |
| 541582 | 65600 | 65615 | Intron 1 | ACTTAGTTCCTAGCCA | eekddddddddddkke | 91 | 1616 |
| 541583 | 66087 | 66102 | Intron 1 | GTGAACCAGATGTGCT | eekddddddddddkke | 86 | 1617 |
| 541584 | 66566 | 66581 | Intron 1 | GGAGTGACAGCTAAGT | eekddddddddddkke | 98 | 1618 |
| 541585 | 66978 | 66993 | Intron 1 | AAGTGTTCAGAGCCAC | eekddddddddddkke | 97 | 1619 |
| 541586 | 67662 | 67677 | Intron 1 | AACCCTGCCAAGGTAC | eekddddddddddkke | 45 | 1620 |
| 541587 | 67914 | 67929 | Intron 1 | GATGGTGAGCACTACC | eekddddddddddkke | 78 | 1621 |
| 541588 | 68278 | 68293 | Intron 1 | GGCAGGATAGGACAGA | eekddddddddddkke | 11 | 1622 |
| 541589 | 68727 | 68742 | Intron 1 | GCAAAGTGATGAGCCT | eekddddddddddkke | 81 | 1623 |
| 541590 | 69207 | 69222 | Intron 1 | CTATCCACACCATTCC | eekddddddddddkke | 93 | 1624 |
| 541591 | 69605 | 69620 | Intron 1 | GGATCATGGGCCCCTA | eekddddddddddkke | 70 | 1625 |
| 541592 | 70130 | 70145 | Intron 1 | GTGAATTTGCTGGGCC | eekddddddddddkke | 94 | 1626 |
| 541593 | 70569 | 70584 | Intron 1 | GTGATGGGCCCAAGGC | eekddddddddddkke | 67 | 1627 |
| 541594 | 71056 | 71071 | Intron 1 | TCCTCAGTCGGCTTGC | eekddddddddddkke | 69 | 1628 |
| 541595 | 71314 | 71329 | Intron 1 | CAGCCTTTTGCCAGAT | eekddddddddddkke | 93 | 1629 |
| 541596 | 71620 | 71635 | Intron 1 | CCTCCCTAGGATTACC | eekddddddddddkke | 42 | 1630 |
| 541597 | 72226 | 72241 | Intron 1 | ACGCCCCAATCACTCA | eekddddddddddkke | 79 | 1631 |
| 541598 | 72655 | 72670 | Intron 1 | GCATGACCCATTATGT | eekddddddddddkke | 94 | 1632 |
| 541599 | 73061 | 73076 | Intron 1 | TCCCTCCAAGAGCTCA | eekddddddddddkke | 83 | 1633 |
| 541600 | 73708 | 73723 | Intron 1 | GATGCCTGTGGCTGAC | eekddddddddddkke | 84 | 1634 |
| 541601 | 74107 | 74122 | Intron 1 | GGCTAGCATGTTGCCT | eekddddddddddkke | 19 | 1635 |
| 541602 | 74542 | 74557 | Intron 1 | TAACCCACTAGGCTGG | eekddddddddddkke | 84 | 1636 |
| 541603 | 74947 | 74962 | Intron 1 | TGGCCCAAAACTAATC | eekddddddddddkke | 34 | 1637 |
| 541604 | 75192 | 75207 | Intron 1 | GGAGCAGTCTGGCACC | eekddddddddddkke | 85 | 1638 |
| 541605 | 75699 | 75714 | Intron 1 | TATTCTGTGGGACAAG | eekddddddddddkke | 51 | 1639 |
| 541606 | 75979 | 75994 | Intron 1 | GTGTCTAGTTCCAGCC | eekddddddddddkke | 86 | 1640 |
| 541607 | 76410 | 76425 | Intron 1 | TACTATCATGTAGCGC | eekddddddddddkke | 87 | 1641 |
| 541608 | 76701 | 76716 | Intron 1 | TGCCCTTGTAGTGAGA | eekddddddddddkke | 31 | 1642 |
| 541609 | 76980 | 76995 | Intron 1 | TCCCCAACCTACAAGC | eekddddddddddkke | 41 | 1643 |
| 541610 | 77292 | 77307 | Intron 1 | GCTCTAGGCATATGAA | eekddddddddddkke | 63 | 1644 |
| 541611 | 77555 | 77570 | Intron 1 | TACCTCCCTTGTAGGG | eekddddddddddkke | 27 | 1645 |
| 541612 | 77854 | 77869 | Intron 1 | GGTTCCCTTGCAGAGA | eekddddddddddkke | 62 | 1646 |
| 541613 | 78311 | 78326 | Intron 1 | GTGCCCTCTTCATGCC | eekddddddddddkke | 68 | 1647 |
| 541614 | 79006 | 79021 | Intron 1 | CCTGTGTGCAACTGGC | eekddddddddddkke | 85 | 1648 |
| 541615 | 79490 | 79505 | Intron 1 | CTGAGTCATTTGCCTG | eekddddddddddkke | 93 | 1649 |
| 541616 | 79829 | 79844 | Intron 1 | GGCCTTAGTAGGCCAG | eekddddddddddkke | 0 | 1650 |
| 541617 | 80277 | 80292 | Intron 1 | GTCCTTGCAGTCAACC | eekddddddddddkke | 77 | 1651 |
| 541618 | 80575 | 80590 | Intron 1 | GCTGGGCCAAGTCCAT | eekddddddddddkke | 77 | 1652 |
| 541619 | 80895 | 80910 | Intron 1 | TAGGGCACTTTTTGCC | eekddddddddddkke | 31 | 1653 |
| 541620 | 81207 | 81222 | Intron 1 | GCTGAGGTCCCTCTCT | eekddddddddddkke | 34 | 1654 |
| 541621 | 81761 | 81776 | Intron 1 | CTTTGGTCCCATTGCC | eekddddddddddkke | 83 | 1655 |
| 541622 | 82233 | 82248 | Intron 1 | GGAACATGCCAAGGGC | eekddddddddddkke | 91 | 1656 |
| 541623 | 82738 | 82753 | Intron 1 | AGGTGGTCTCCCTTCA | eekddddddddddkke | 74 | 1657 |
| 541624 | 83056 | 83071 | Intron 1 | TCCCAAAGCTCCCCTC | eekddddddddddkke | 53 | 1658 |
| 541625 | 83401 | 83416 | Intron 1 | CCTGGCCTAGCAAGCT | eekddddddddddkke | 47 | 1659 |
| 541626 | 84048 | 84063 | Intron 1 | TCTTAGCCCTGGGCTA | eekddddddddddkke | 12 | 1660 |
| 541627 | 84388 | 84403 | Intron 1 | GACTTGGACTGGGCTC | eekddddddddddkke | 81 | 1661 |
| 541628 | 85261 | 85276 | Intron 1 | GGCCTAGGATCTAGGA | eekddddddddddkke | 0 | 1662 |
| 541629 | 85714 | 85729 | Intron 1 | GTCAGGCTAGAGGGAC | eekddddddddddkke | 41 | 1663 |
| 541630 | 86220 | 86235 | Intron 1 | GGAAGTTCTCCCAGCC | eekddddddddddkke | 47 | 1664 |
| 541631 | 86640 | 86655 | Intron 1 | CCTGACTGATGTACAC | eekddddddddddkke | 35 | 1665 |
| 541632 | 86903 | 86918 | Intron 1 | CTCTGGCCTAGCCTAT | eekddddddddddkke | 54 | 1666 |
| 541633 | 87247 | 87262 | Intron 1 | GGCTGCTGTCAGATGC | eekddddddddddkke | 79 | 1667 |
| 541634 | 88293 | 88308 | Intron 1 | TCTCAGGTGTAGGCAG | eekddddddddddkke | 59 | 1668 |
| 541635 | 88605 | 88620 | Intron 1 | GGTCACTGAGACTGGG | eekddddddddddkke | 88 | 1669 |
| 541636 | 88952 | 88967 | Intron 1 | ACCCACTAGCAGCTAG | eekddddddddddkke | 61 | 1670 |
| 541637 | 89160 | 89175 | Intron 1 | CGGATGAGGCAGTTAG | eekddddddddddkke | 42 | 1671 |
| 541638 | 89855 | 89870 | Intron 1 | TGGTAGGCCCTCTGGC | eekddddddddddkke | 28 | 1672 |
| 541639 | 90240 | 90255 | Intron 1 | GTCACAAGGTGGGTGC | eekddddddddddkke | 28 | 1673 |
| 541640 | 90513 | 90528 | Intron 1 | GTCTTGCCCTCACGGA | eekddddddddddkke | 73 | 1674 |
| 541641 | 91073 | 91088 | Intron 1 | GCAGTCTGTGGACTTA | eekddddddddddkke | 93 | 1675 |
| 541642 | 91647 | 91662 | Intron 1 | TGCTCTCTGGTCACAC | eekddddddddddkke | 75 | 1676 |
| 541643 | 92069 | 92084 | Intron 1 | TATCCCCCAGAGCCAT | eekddddddddddkke | 68 | 1677 |
| 541644 | 92356 | 92371 | Intron 1 | AAGGTGAGAGGGCACT | eekddddddddddkke | 75 | 1678 |
| 541645 | 92904 | 92919 | Intron 1 | GTTTTAACCTCACCCT | eekddddddddddkke | 0 | 1679 |
| 541646 | 93846 | 93861 | Intron 1 | CCTTCCACTGACCTTC | eekddddddddddkke | 56 | 1680 |
| 541647 | 94374 | 94389 | Intron 1 | GACACTAGCCTAAGCC | eekddddddddddkke | 37 | 1681 |

TABLE 178
Inhibition of GHR mRNA by deoxy, MOE and (S)-cEt
gapmers targeting intronic regions of SEQ ID NO: 2

| | SEQ ID | SEQ ID | | | | | |
|---|---|---|---|---|---|---|---|
| | NO: 2 | NO: 2 | | | | | |
| ISIS | Start | Stop | Target | | | % | SEQ |
| NO | Site | Site | Region | Sequence | Chemistry | inhibition | ID NO |
| 541262 | 156891 | 156906 | Intron 2 | TTGGTTTGTCAATCCT | eekddddddddddkke | 94 | 1370 |
| 541648 | 94638 | 94653 | Intron 1 | GGTTAGCCCTCAGCCT | eekddddddddddkke | 61 | 1682 |
| 541649 | 94839 | 94854 | Intron 1 | TATGAAGGTTGGACCA | eekddddddddddkke | 69 | 1683 |
| 541650 | 95509 | 95524 | Intron 1 | CAACCAGCTCACCTGA | eekddddddddddkke | 37 | 1684 |
| 541651 | 95829 | 95844 | Intron 1 | GGGCTCCAAGGCTCTC | eekddddddddddkke | 75 | 1685 |
| 541652 | 96158 | 96173 | Intron 1 | AGCTGTTACATGCCAA | eekddddddddddkke | 93 | 1686 |
| 541653 | 96488 | 96503 | Intron 1 | GGCCCAGAGGTTATAG | eekddddddddddkke | 30 | 1687 |
| 541654 | 96991 | 97006 | Intron 1 | GTCCTTAGACCCCTCA | eekddddddddddkke | 70 | 1688 |
| 541655 | 97539 | 97554 | Intron 1 | GCCCTGGCTAGAGACA | eekddddddddddkke | 39 | 1689 |
| 541656 | 98132 | 98147 | Intron 1 | CATCCAGCAGCTGGAC | eekddddddddddkke | 35 | 1690 |
| 541657 | 98833 | 98848 | Intron 1 | GACTGAGGTCATCACA | eekddddddddddkke | 60 | 1691 |
| 541658 | 99258 | 99273 | Intron 1 | GGCCAGGCACATCATG | eekddddddddddkke | 45 | 1692 |
| 541659 | 99843 | 99858 | Intron 1 | GGAGCTCATTGAGCCA | eekddddddddddkke | 36 | 1693 |
| 541660 | 100406 | 100421 | Intron 1 | GTGCCCATTGCTGTGT | eekddddddddddkke | 70 | 1694 |
| 541661 | 100742 | 100757 | Intron 1 | CCAAGTGTGGCTTCAG | eekddddddddddkke | 54 | 1695 |
| 541662 | 101305 | 101320 | Intron 1 | CCACCCTTTATACGCA | eekddddddddddkke | 87 | 1696 |
| 541663 | 101788 | 101803 | Intron 1 | CAGTAACCCCAAGGGA | eekddddddddddkke | 12 | 1697 |
| 541664 | 102649 | 102664 | Intron 1 | CCCCACCTTATATGGG | eekddddddddddkke | 9 | 1698 |
| 541665 | 103034 | 103049 | Intron 1 | AGGCCCTTTTTACATG | eekddddddddddkke | 9 | 1699 |
| 541666 | 103316 | 103331 | Intron 1 | TCAATAAGTCCCTAGG | eekddddddddddkke | 20 | 1700 |
| 541667 | 104277 | 104292 | Intron 1 | GGCATTGAGTGACTGC | eekddddddddddkke | 51 | 1701 |
| 541668 | 104679 | 104694 | Intron 1 | ATAATGCCTTCTCAGC | eekddddddddddkke | 62 | 1702 |
| 541669 | 106349 | 106364 | Intron 1 | GTGAGGCATTTAGCCC | eekddddddddddkke | 35 | 1703 |
| 541670 | 106632 | 106647 | Intron 1 | GCTCTTGTGTTGGGTA | eekddddddddddkke | 89 | 1704 |
| 541671 | 107084 | 107099 | Intron 1 | TGTGCAGGAGGTCTCA | eekddddddddddkke | 60 | 1705 |
| 541672 | 107949 | 107964 | Intron 1 | TGGAGAGTCTTGTCTC | eekddddddddddkke | 17 | 1706 |
| 541673 | 108773 | 108788 | Intron 1 | GTGACCCACCCAAGAG | eekddddddddddkke | 34 | 1707 |
| 541674 | 109336 | 109351 | Intron 1 | GTTGTAGCTAGTGTTC | eekddddddddddkke | 74 | 1708 |
| 541675 | 109849 | 109864 | Intron 1 | GCCTTAGTTTGTGCCA | eekddddddddddkke | 78 | 1709 |
| 541676 | 110427 | 110442 | Intron 1 | GCCCCAGCTGAGAATT | eekddddddddddkke | 29 | 1710 |
| 541677 | 110701 | 110716 | Intron 1 | ACAACAATCCAGGGTG | eekddddddddddkke | 61 | 1711 |
| 541678 | 110959 | 110974 | Intron 1 | CTCCCCTGGAAGTCAC | eekddddddddddkke | 59 | 1712 |
| 541679 | 111307 | 111322 | Intron 1 | GCCCTCATGGCTCAAG | eekddddddddddkke | 60 | 1713 |
| 541680 | 112499 | 112514 | Intron 1 | TCAGCAGATAGGGAGC | eekddddddddddkke | 61 | 1714 |
| 541681 | 113896 | 113911 | Intron 1 | GAATGCGGTGATCAGG | eekddddddddddkke | 29 | 1715 |
| 541682 | 117477 | 117492 | Intron 1 | CTGAGAGAATTGGCCC | eekddddddddddkke | 5 | 1716 |
| 541683 | 117740 | 117755 | Intron 1 | AGGCACATTGTTACCA | eekddddddddddkke | 26 | 1717 |
| 541684 | 118229 | 118244 | Intron 1 | GGGAGGCACTAGAGAA | eekddddddddddkke | 13 | 1718 |
| 541685 | 119269 | 119284 | Intron 1 | TACAGTAACACATCCC | eekddddddddddkke | 78 | 1719 |
| 541686 | 119688 | 119703 | Intron 1 | GAAGCTCAGCCTGATC | eekddddddddddkke | 45 | 1720 |
| 541687 | 120376 | 120391 | Intron 1 | CTTGCCTGACAACCTA | eekddddddddddkke | 53 | 1721 |
| 541688 | 120738 | 120753 | Intron 1 | GCCTACCTGCTTTTGC | eekddddddddddkke | 10 | 1722 |
| 541689 | 121242 | 121257 | Intron 1 | TTTCCCAACCACTTAG | eekddddddddddkke | 7 | 1723 |
| 541690 | 121615 | 121630 | Intron 1 | TCTCCTATTTCAGTTA | eekddddddddddkke | 23 | 1724 |
| 541691 | 121823 | 121838 | Intron 1 | GGGTGATGGATGAACT | eekddddddddddkke | 40 | 1725 |
| 541692 | 122345 | 122360 | Intron 1 | ACACTGCTGGTAGTGA | eekddddddddddkke | 0 | 1726 |
| 541693 | 122588 | 122603 | Intron 1 | ACCCAACTAGCCTGTC | eekddddddddddkke | 35 | 1727 |
| 541694 | 123152 | 123167 | Intron 1 | GAGACCTGCTGCCTGA | eekddddddddddkke | 80 | 1728 |
| 541695 | 123671 | 123686 | Intron 1 | ACATCTCTTGGGAGGT | eekddddddddddkke | 78 | 1729 |
| 541696 | 124040 | 124055 | Intron 1 | ACATAGTACCCCTCCA | eekddddddddddkke | 35 | 1730 |
| 541697 | 124430 | 124445 | Intron 1 | CTCTCAAGTACCTGCC | eekddddddddddkke | 72 | 1731 |
| 541698 | 124824 | 124839 | Intron 1 | TTTGTACCCAACCCCC | eekddddddddddkke | 15 | 1732 |
| 541699 | 125032 | 125047 | Intron 1 | AGGCCCACATAAATGC | eekddddddddddkke | 21 | 1733 |
| 541700 | 125533 | 125548 | Intron 1 | GAGCATCCCCTACACT | eekddddddddddkke | 12 | 1734 |
| 541701 | 126357 | 126372 | Intron 1 | GCTGGGCCTTTAGCTG | eekddddddddddkke | 66 | 1735 |
| 541702 | 126736 | 126751 | Intron 1 | TTGGTCAATTGGGCAG | eekddddddddddkke | 79 | 1736 |
| 541703 | 127179 | 127194 | Intron 1 | GTCTCATGAGGCCTAT | eekddddddddddkke | 60 | 1737 |
| 541704 | 127454 | 127469 | Intron 1 | GGAGGTGGGATCCCAC | eekddddddddddkke | 35 | 1738 |
| 541705 | 128467 | 128482 | Intron 1 | GCCCACTACCTAGCAC | eekddddddddddkke | 30 | 1739 |
| 541706 | 129096 | 129111 | Intron 1 | CCCAGCTGGCTGGTCG | eekddddddddddkke | 50 | 1740 |
| 541707 | 129312 | 129327 | Intron 1 | GCACCAGGTCTCCTGT | eekddddddddddkke | 7 | 1741 |
| 541708 | 129516 | 129531 | Intron 1 | GTCTAGAAGCCTAGGG | eekddddddddddkke | 23 | 1742 |
| 541709 | 129976 | 129991 | Intron 1 | GCCGGGTGTTGGTGCA | eekddddddddddkke | 50 | 1743 |
| 541710 | 130308 | 130323 | Intron 1 | TTGGTGCCTGTGTTGC | eekddddddddddkke | 49 | 1744 |
| 541711 | 130767 | 130782 | Intron 1 | TGCTTCTGATCCCTAC | eekddddddddddkke | 18 | 1745 |
| 541712 | 131286 | 131301 | Intron 1 | GTTCCCAGGAGGCTTA | eekddddddddddkke | 56 | 1746 |
| 541713 | 131676 | 131691 | Intron 1 | AGGCCCCTAGAGTCTA | eekddddddddddkke | 41 | 1747 |
| 541714 | 132292 | 132307 | Intron 1 | TGGTGTGCCCAGACTT | eekddddddddddkke | 60 | 1748 |
| 541715 | 132730 | 132745 | Intron 1 | GATGGCTAACCCACTG | eekddddddddddkke | 14 | 1749 |
| 541716 | 133101 | 133116 | Intron 1 | CCCCCAAAAGTTGCCC | eekddddddddddkke | 12 | 1750 |
| 541717 | 133522 | 133537 | Intron 1 | TAGGGTGTTCCAGATC | eekddddddddddkke | 44 | 1751 |
| 541718 | 133724 | 133739 | Intron 1 | GTACCATGAAGCTCTG | eekddddddddddkke | 67 | 1752 |
| 541719 | 134086 | 134101 | Intron 1 | CTTGGACTTGGACCAT | eekddddddddddkke | 42 | 1753 |
| 541720 | 134441 | 134456 | Intron 1 | GTGCATAGGGCCTGTC | eekddddddddddkke | 42 | 1754 |
| 541721 | 135015 | 135030 | Intron 1 | CCTCACCTGAACACCC | eekddddddddddkke | 23 | 1755 |
| 541722 | 135859 | 135874 | Intron 1 | ATGCCTCCCCGCAACT | eekddddddddddkke | 27 | 1756 |
| 541723 | 136287 | 136302 | Intron 1 | TTGTGCTTGGGTGTAC | eekddddddddddkke | 39 | 1757 |
| 541724 | 137000 | 137015 | Intron 1 | AGGCTTCATGTGAGGT | eekddddddddddkke | 86 | 1758 |

TABLE 179
Inhibition of GHR mRNA by deoxy, MOE and (S)-cEt
gapmers targeting introns 1 and 2 of SEQ ID NO: 2

| | SEQ | SEQ | | | | | |
|---|---|---|---|---|---|---|---|
| | ID NO: | ID NO: | | | | | |
| ISIS | 2 Start | 2 Stop | Target | | | % | SEQ |
| NO | Site | Site | Region | Sequence | Chemistry | inhibition | ID NO |
| 541262 | 156891 | 156906 | Intron 2 | TTGGTTTGTCAATCCT | eekddddddddddkke | 95 | 1370 |
| 541725 | 137372 | 137387 | Intron 1 | TGTAAAAGGTCCTCCC | eekddddddddddkke | 53 | 1759 |
| 541726 | 137750 | 137765 | Intron 1 | GACCTGTGCAGCAGGT | eekddddddddddkke | 32 | 1760 |
| 541727 | 138783 | 138798 | Intron 1 | TCCTCTTGGAGATCCA | eekddddddddddkke | 44 | 1761 |
| 541728 | 139825 | 139840 | Intron 1 | AGGTCATAGGACTGCT | eekddddddddddkke | 73 | 1762 |
| 541729 | 140343 | 140358 | Intron 1 | GAAGGTCAGACTAGGG | eekddddddddddkke | 53 | 1763 |
| 541730 | 140686 | 140701 | Intron 1 | TCTGTAGACTGCCCAG | eekddddddddddkke | 87 | 1764 |
| 541731 | 141116 | 141131 | Intron 1 | GTCCCTCTATTCCCCT | eekddddddddddkke | 57 | 1765 |
| 541732 | 141591 | 141606 | Intron 1 | AATTGCCATGCTCCCA | eekddddddddddkke | 56 | 1766 |
| 541733 | 142113 | 142128 | Intron 1 | GATGACCTTCCTCCAA | eekddddddddddkke | 15 | 1767 |
| 541734 | 142327 | 142342 | Intron 1 | GTTTCCAGTAGCACCT | eekddddddddddkke | 82 | 1768 |
| 541735 | 143118 | 143133 | Intron 1 | GGCCTTGAGCTGATGG | eekddddddddddkke | 11 | 1769 |
| 541736 | 143836 | 143851 | Intron 1 | TATCCCTAATCAGGCT | eekddddddddddkke | 40 | 1770 |
| 541737 | 144094 | 144109 | Intron 1 | GGTGTCCACATCCCGG | eekddddddddddkke | 58 | 1771 |
| 541738 | 144558 | 144573 | Intron 1 | AGCTGGACAGGCCATA | eekddddddddddkke | 27 | 1772 |
| 541740 | 145510 | 145525 | Intron 2 | GGTAATCACCCAGAGA | eekddddddddddkke | 90 | 1773 |
| 541741 | 145937 | 145952 | Intron 2 | GCGCTAAGTCTGCTGT | eekddddddddddkke | 92 | 1774 |
| 541742 | 146320 | 146335 | Intron 2 | CCTCAAATCTTGCCCA | eekddddddddddkke | 96 | 1775 |
| 541743 | 147028 | 147043 | Intron 2 | ATCCAGACCTGGCAGA | eekddddddddddkke | 84 | 1776 |
| 541744 | 147262 | 147277 | Intron 2 | ATCCCTGCTCAAGTGC | eekddddddddddkke | 89 | 1777 |
| 541745 | 147671 | 147686 | Intron 2 | CAGGCACTCCTTGGAA | eekddddddddddkke | 93 | 1778 |
| 541746 | 148139 | 148154 | Intron 2 | AGCTGAGGTATCCCTC | eekddddddddddkke | 94 | 1779 |
| 541747 | 148564 | 148579 | Intron 2 | GGGCCCAGCAAGTCTT | eekddddddddddkke | 33 | 1780 |
| 541748 | 149069 | 149084 | Intron 2 | GTTTTGTCAGTGTGCA | eekddddddddddkke | 98 | 1781 |
| 541749 | 149491 | 149506 | Intron 2 | GTGACCTGCTGAACTC | eekddddddddddkke | 95 | 1782 |
| 541750 | 150236 | 150251 | Intron 2 | GGCTGAACTGTGCACC | eekddddddddddkke | 95 | 1783 |
| 541751 | 150748 | 150763 | Intron 2 | GGGTGGTCCCACTCCT | eekddddddddddkke | 91 | 1784 |
| 541752 | 151124 | 151139 | Intron 2 | GAGGAATCCTGGGCCC | eekddddddddddkke | 94 | 1785 |
| 541753 | 151373 | 151388 | Intron 2 | ATGACAAGCTAGGTGC | eekddddddddddkke | 81 | 1786 |
| 541754 | 151644 | 151659 | Intron 2 | TTGCCAGACAGGGCAC | eekddddddddddkke | 18 | 1787 |
| 541755 | 152373 | 152388 | Intron 2 | AGACCCCTCCCACTAT | eekddddddddddkke | 43 | 1788 |
| 541756 | 152617 | 152632 | Intron 2 | GGTGCTGGGTGACCGG | eekddddddddddkke | 91 | 1789 |
| 541757 | 153349 | 153364 | Intron 2 | GGCCAAACGGTGCCCT | eekddddddddddkke | 23 | 1790 |
| 541758 | 153918 | 153933 | Intron 2 | TGGGTGAATAGCAACC | eekddddddddddkke | 85 | 1791 |
| 541759 | 154171 | 154186 | Intron 2 | GCCCCCAAGGAAGTGA | eekddddddddddkke | 76 | 1792 |
| 541760 | 154813 | 154828 | Intron 2 | CAGGCTTCATGTGTGG | eekddddddddddkke | 92 | 1793 |
| 541761 | 155289 | 155304 | Intron 2 | CTGTCAGTGCTTTGGT | eekddddddddddkke | 52 | 1794 |
| 541762 | 156233 | 156248 | Intron 2 | GAGTACCCTGGCAGGT | eekddddddddddkke | 58 | 1795 |
| 541763 | 156847 | 156862 | Intron 2 | TAGCTAGCACCTGGGT | eekddddddddddkke | 90 | 1796 |
| 541764 | 157552 | 157567 | Intron 2 | GGCAAACCTTTGAGCC | eekddddddddddkke | 27 | 1797 |
| 541765 | 157927 | 157942 | Intron 2 | GCTATCATTGGAGCAG | eekddddddddddkke | 94 | 1798 |
| 541766 | 158542 | 158557 | Intron 2 | CCTCTGAGTACTCCCT | eekddddddddddkke | 96 | 1799 |
| 541767 | 159252 | 159267 | Intron 2 | AGCTGAAGGCAACCAG | eekddddddddddkke | 97 | 1800 |
| 541768 | 159539 | 159554 | Intron 2 | GGGCAGTTTTCCATAG | eekddddddddddkke | 89 | 1801 |
| 541769 | 159778 | 159793 | Intron 2 | GGTCCTACCTCTGACA | eekddddddddddkke | 82 | 1802 |
| 541770 | 160352 | 160367 | Intron 2 | GGCTGCCTTAGGGTGG | eekddddddddddkke | 90 | 1803 |
| 541771 | 160812 | 160827 | Intron 2 | CGCACCTCCCCCACTA | eekddddddddddkke | 15 | 1804 |
| 541772 | 161461 | 161476 | Intron 2 | GCTTATTGGTCCATGG | eekddddddddddkke | 93 | 1805 |
| 541773 | 161821 | 161836 | Intron 2 | AACCGCAGAGCCCCCA | eekddddddddddkke | 76 | 1806 |
| 541774 | 162132 | 162147 | Intron 2 | GGGCTTGTTCTGCCAA | eekddddddddddkke | 33 | 1807 |
| 541775 | 162639 | 162654 | Intron 2 | GGGACCTGCGCTGACT | eekddddddddddkke | 86 | 1808 |
| 541776 | 163024 | 163039 | Intron 2 | CTTTCACCTGGTGACT | eekddddddddddkke | 83 | 1809 |
| 541777 | 163542 | 163557 | Intron 2 | AGCTTGAGGGAGTATA | eekddddddddddkke | 52 | 1810 |
| 541778 | 164144 | 164159 | Intron 2 | GCCTGCTCAATTGAGG | eekddddddddddkke | 32 | 1811 |
| 541779 | 164570 | 164585 | Intron 2 | ATAGCAGCTGGCTGCC | eekddddddddddkke | 24 | 1812 |
| 541780 | 165419 | 165434 | Intron 2 | AAAAGCTTGGCACCCC | eekddddddddddkke | 91 | 1813 |
| 541781 | 165859 | 165874 | Intron 2 | CCTGGCAAGAAGGGCC | eekddddddddddkke | 65 | 1814 |
| 541782 | 166435 | 166450 | Intron 2 | TTAGCCCATCTATCCC | eekddddddddddkke | 82 | 1815 |
| 541783 | 166837 | 166852 | Intron 2 | GTGGTCTCCCTGTGCC | eekddddddddddkke | 90 | 1816 |
| 541784 | 167107 | 167122 | Intron 2 | AGCCCTCTCTGGCAAA | eekddddddddddkke | 38 | 1817 |
| 541785 | 168004 | 168019 | Intron 2 | TTACTGTGGCCCGAGT | eekddddddddddkke | 94 | 1818 |
| 541786 | 169062 | 169077 | Intron 2 | GTAGACTCCTAGGGTC | eekddddddddddkke | 90 | 1819 |
| 541787 | 169696 | 169711 | Intron 2 | CCTCCAGTTAGTGTGC | eekddddddddddkke | 91 | 1820 |
| 541788 | 170081 | 170096 | Intron 2 | GTGGGTGGCCAACAGG | eekddddddddddkke | 91 | 1821 |
| 541789 | 170799 | 170814 | Intron 2 | GGGATTCCCTGGTAGC | eekddddddddddkke | 77 | 1822 |
| 541790 | 171021 | 171036 | Intron 2 | GTGAGACCGGCCTTTG | eekddddddddddkke | 23 | 1823 |
| 541791 | 171530 | 171545 | Intron 2 | ACTGGCACCCACTTGG | eekddddddddddkke | 54 | 1824 |
| 541792 | 172447 | 172462 | Intron 2 | ATTGGCCTAATGCCCC | eekddddddddddkke | 76 | 1825 |
| 541793 | 172733 | 172748 | Intron 2 | AGGCTATACATTCCAG | eekddddddddddkke | 94 | 1826 |
| 541794 | 173045 | 173060 | Intron 2 | GGTGGCAGCTAGGTGG | eekddddddddddkke | 80 | 1827 |
| 541795 | 173677 | 173692 | Intron 2 | TCCACAGTTGGCACTG | eekddddddddddkke | 77 | 1828 |
| 541796 | 174128 | 174143 | Intron 2 | TGGGCCTTAGATTGTA | eekddddddddddkke | 69 | 1829 |
| 541797 | 174521 | 174536 | Intron 2 | TGTCTTCCTGGTGGCC | eekddddddddddkke | 97 | 1830 |
| 541798 | 174870 | 174885 | Intron 2 | CCCGCCTCTCCAGCAA | eekddddddddddkke | 89 | 1831 |
| 541799 | 175275 | 175290 | Intron 2 | GCAGCAGCCAATAAGT | eekddddddddddkke | 76 | 1832 |
| 541800 | 175691 | 175706 | Intron 2 | TTGTATCCTGGCCCCT | eekddddddddddkke | 80 | 1833 |
| 541801 | 176038 | 176053 | Intron 2 | GCCTCATGGGCCTTAC | eekddddddddddkke | 66 | 1834 |

TABLE 180
Inhibition of GHR mRNA by deoxy, MOE and (S)-cEt
gapmers targeting introns 2 and 3 of SEQ ID NO: 2

| | SEQ | SEQ ID | | | | | |
|---|---|---|---|---|---|---|---|
| | ID NO: | NO: 2 | | | | | SEQ |
| ISIS | 2 Start | Stop | Target | | | % | ID |
| NO | Site | Site | Region | Sequence | Chemistry | inhibition | NO |
| 541262 | 156891 | 156906 | Intron 2 | TTGGTTTGTCAATCCT | eekddddddddddkke | 97 | 1370 |
| 541802 | 176619 | 176634 | Intron 2 | GGATGCCAGTCTTGGC | eekddddddddddkke | 48 | 1835 |
| 541803 | 176835 | 176850 | Intron 2 | CTGCTCTCAGTACCTC | eekddddddddddkke | 87 | 1836 |
| 541804 | 177300 | 177315 | Intron 2 | ACCCAAGAAGTCACCT | eekddddddddddkke | 93 | 1837 |
| 541805 | 177551 | 177566 | Intron 2 | GCCTCAAGCCCTACCC | eekddddddddddkke | 73 | 1838 |
| 541806 | 178066 | 178081 | Intron 2 | AGCTCCAGCCTATAGA | eekddddddddddkke | 81 | 1839 |
| 541807 | 178361 | 178376 | Intron 2 | GGTCCACATGGCCCTA | eekddddddddddkke | 90 | 1840 |
| 541808 | 178895 | 178910 | Intron 2 | CAGGCCCAGGATTGTC | eekddddddddddkke | 81 | 1841 |
| 541809 | 179444 | 179459 | Intron 2 | GGGCCTGCTTTGCAGC | eekddddddddddkke | 81 | 1842 |
| 541810 | 179863 | 179878 | Intron 2 | ACTCCTCTCTTTAGGC | eekddddddddddkke | 87 | 1843 |
| 541811 | 180524 | 180539 | Intron 2 | CTGGGTAACAGTCCTC | eekddddddddddkke | 98 | 1844 |
| 541812 | 181528 | 181543 | Intron 2 | ACTGTATGGTTTCCAC | eekddddddddddkke | 83 | 1845 |
| 541813 | 182103 | 182118 | Intron 2 | GCCAAAGATAGCTCTT | eekddddddddddkke | 94 | 1846 |
| 541814 | 182978 | 182993 | Intron 2 | GGCATTGGAAGTTGGT | eekddddddddddkke | 87 | 1847 |
| 541815 | 183193 | 183208 | Intron 2 | CCCTTCCTGACCTTAC | eekddddddddddkke | 55 | 1848 |
| 541816 | 183658 | 183673 | Intron 2 | TTACCCTCTATTCACC | eekddddddddddkke | 65 | 1849 |
| 541818 | 184501 | 184516 | Intron 2 | GGCACCCCAGGCCGGG | eekddddddddddkke | 25 | 1850 |
| 541819 | 185080 | 185095 | Intron 2 | CAGCAGCTAGTTCCCC | eekddddddddddkke | 96 | 1851 |
| 541820 | 185327 | 185342 | Intron 2 | GTGGGCACTAGTGTGT | eekddddddddddkke | 75 | 1852 |
| 541821 | 185682 | 185697 | Intron 2 | TGCCCTTGTCAGGGCA | eekddddddddddkke | 20 | 1853 |
| 541822 | 186025 | 186040 | Intron 2 | GCAGATAGGCTCAGCA | eekddddddddddkke | 98 | 1854 |
| 541823 | 186570 | 186585 | Intron 2 | CCCTAGCCCTTAGCAC | eekddddddddddkke | 44 | 1855 |
| 541824 | 186841 | 186856 | Intron 2 | ACTGGAATGGCCCTCT | eekddddddddddkke | 86 | 1856 |
| 541825 | 187176 | 187191 | Intron 2 | TTTGCTCATGCTCACA | eekddddddddddkke | 96 | 1857 |
| 541826 | 187629 | 187644 | Intron 2 | GCCTTTGTGTGTCACT | eekddddddddddkke | 99 | 1858 |
| 541827 | 187857 | 187872 | Intron 2 | TATGTGGTAGCATGTC | eekddddddddddkke | 96 | 1859 |
| 541828 | 188442 | 188457 | Intron 2 | CCCCAGGAAGTTGGCC | eekddddddddddkke | 68 | 1860 |
| 541829 | 189086 | 189101 | Intron 2 | TAGCTGTCAAGGCCCT | eekddddddddddkke | 90 | 1861 |
| 541830 | 189534 | 189549 | Intron 2 | CCTAGTCAGCCACTAG | eekddddddddddkke | 20 | 1862 |
| 541831 | 189889 | 189904 | Intron 2 | AGACTCCCCATCAGCC | eekddddddddddkke | 74 | 1863 |
| 541832 | 190172 | 190187 | Intron 2 | GTGAAGGGCCTTCATC | eekddddddddddkke | 68 | 1864 |
| 541833 | 190961 | 190976 | Intron 2 | GGTTGAGAGTCCAATG | eekddddddddddkke | 95 | 1865 |
| 541834 | 191404 | 191419 | Intron 2 | CAGCTAATTCCCTCAT | eekddddddddddkke | 79 | 1866 |
| 541835 | 191614 | 191629 | Intron 2 | TTGTGTCTCAACCCAC | eekddddddddddkke | 95 | 1867 |
| 541836 | 191999 | 192014 | Intron 2 | GGCTATGCTGCATGCT | eekddddddddddkke | 91 | 1868 |
| 541837 | 192860 | 192875 | Intron 2 | CCCCATACCCAGTGGA | eekddddddddddkke | 71 | 1869 |
| 541838 | 193460 | 193475 | Intron 2 | GGTGGTTTTCCTCCCT | eekddddddddddkke | 95 | 1870 |
| 541839 | 194144 | 194159 | Intron 2 | GAGCCTGCCCAACTTT | eekddddddddddkke | 90 | 1871 |
| 541840 | 194425 | 194440 | Intron 2 | TGATGCCCAAGAGTGA | eekddddddddddkke | 85 | 1872 |
| 541841 | 194953 | 194968 | Intron 2 | TTCCCTCTGCGAACAT | eekddddddddddkke | 96 | 1873 |
| 541842 | 195428 | 195443 | Intron 2 | GTTCCATCTCAATCCA | eekddddddddddkke | 94 | 1874 |
| 541843 | 196858 | 196873 | Intron 2 | ACGGCCACTCCACTGG | eekddddddddddkke | 44 | 1875 |
| 541844 | 197326 | 197341 | Intron 2 | TGGAAGTGGTTCCAGA | eekddddddddddkke | 90 | 1876 |
| 541845 | 197946 | 197961 | Intron 2 | TTGCCCCAGACCAACA | eekddddddddddkke | 47 | 1877 |
| 541846 | 198366 | 198381 | Intron 2 | GAGGTTGTGGAGGTGC | eekddddddddddkke | 26 | 1878 |
| 541847 | 198715 | 198730 | Intron 2 | GAGTTGCTGTGTGTGA | eekddddddddddkke | 83 | 1879 |
| 541848 | 198939 | 198954 | Intron 2 | CATGTCAGAGGTGTCC | eekddddddddddkke | 93 | 1880 |
| 541849 | 199506 | 199521 | Intron 2 | AGGTAAGGATCATGGC | eekddddddddddkke | 87 | 1881 |
| 541850 | 199816 | 199831 | Intron 2 | GTTCAGTTGCATCACG | eekddddddddddkke | 90 | 1882 |
| 541851 | 200249 | 200264 | Intron 2 | GCCCAGCTAGCCACCC | eekddddddddddkke | 68 | 1883 |
| 541852 | 201258 | 201273 | Intron 2 | CCTTAGCAGCCAGGCC | eekddddddddddkke | 86 | 1884 |
| 541853 | 202079 | 202094 | Intron 2 | GCACTTAGGGTTTTGC | eekddddddddddkke | 94 | 1885 |
| 541854 | 202382 | 202397 | Intron 2 | GTTGAACTTTCCCTAC | eekddddddddddkke | 53 | 1886 |
| 541855 | 202702 | 202717 | Intron 2 | TGACTCCTTGAGACAG | eekddddddddddkke | 83 | 1887 |
| 541856 | 203098 | 203113 | Intron 2 | TGCGCTGGCTTAGCAA | eekddddddddddkke | 59 | 1888 |
| 541857 | 203464 | 203479 | Intron 2 | GGCCTAACATCAGCAG | eekddddddddddkke | 88 | 1889 |
| 541858 | 204212 | 204227 | Intron 2 | ACTCCTCCCAGTTAGC | eekddddddddddkke | 70 | 1890 |
| 541859 | 205630 | 205645 | Intron 2 | ACCAGTGGCCAATGTC | eekddddddddddkke | 92 | 1891 |
| 541861 | 206422 | 206437 | Intron 2 | GCCTAGACACAGTAGG | eekddddddddddkke | 70 | 1892 |
| 541862 | 206749 | 206764 | Intron 2 | TATTCTCCCCCTAGGG | eekddddddddddkke | 42 | 1893 |
| 541863 | 207517 | 207532 | Intron 2 | GACGGCCTTGGGCACA | eekddddddddddkke | 96 | 1894 |
| | 210196 | 210211 | | | | | |
| 541865 | 208659 | 208674 | Intron 3 | GCAGGCTGTATTAGCA | eekddddddddddkke | 15 | 1895 |
| 541867 | 209999 | 210014 | Intron 3 | ACCCCCTATCCTGCAC | eekddddddddddkke | 58 | 1896 |
| 541868 | 210281 | 210296 | Intron 3 | TCCTCCATACCTAGAG | eekddddddddddkke | 61 | 1897 |
| | 211033 | 211048 | | | | | |
| 541869 | 210502 | 210517 | Intron 3 | GATAGGTGCCCACTGT | eekddddddddddkke | 80 | 1898 |
| 541870 | 210920 | 210935 | Intron 3 | GTCAGTTCTGGCTAGG | eekddddddddddkke | 97 | 1899 |
| 541871 | 211269 | 211284 | Intron 3 | GCCTGAACTTACAAGC | eekddddddddddkke | 68 | 1900 |
| 541872 | 211836 | 211851 | Intron 3 | ACCCTGGGCTGACCTT | eekddddddddddkke | 92 | 1901 |
| 541873 | 212606 | 212621 | Intron 3 | GGACCTGGACAAGCAA | eekddddddddddkke | 97 | 1902 |
| 541874 | 213099 | 213114 | Intron 3 | CTCCTTGCGAGAGAGG | eekddddddddddkke | 7 | 1903 |
| 541875 | 213425 | 213440 | Intron 3 | AGAGTTGACATGGGCA | eekddddddddddkke | 96 | 1904 |
| 541876 | 213846 | 213861 | Intron 3 | CACTAGGTCCCTGACC | eekddddddddddkke | 37 | 1905 |
| 541877 | 214483 | 214498 | Intron 3 | CACTCTCTTGGGCTGT | eekddddddddddkke | 94 | 1906 |
| 541878 | 214884 | 214899 | Intron 3 | AGGGACCTGCATTCCA | eekddddddddddkke | 72 | 1907 |

TABLE 181
Inhibition of GHR mRNA by deoxy, MOE and (S)-cEt
gapmers targeting introns 2 and 3 of SEQ ID NO: 2

| | | SEQ | | | | | |
|---|---|---|---|---|---|---|---|
| | SEQ ID | ID NO: | | | | | |
| ISIS | NO: 2 | 2 Stop | Target | | | % | SEQ ID |
| NO | Start Site | Site | Region | Sequence | Chemistry | inhibition | NO |
| 541262 | 156891 | 156906 | Intron 2 | TTGGTTTGTCAATCCT | eekddddddddddkke | 91 | 1370 |
| 541879 | 215493 | 215508 | Intron 3 | TTCACCACCCATTGGG | eekddddddddddkke | 63 | 1908 |
| 541880 | 216192 | 216207 | Intron 3 | ATCTGGTCTGAGGGCC | eekddddddddddkke | 92 | 1909 |
| 541881 | 216458 | 216473 | Intron 3 | GACATGCAATTGACCC | eekddddddddddkke | 98 | 1910 |
| 541882 | 217580 | 217595 | Intron 3 | GTGTGCAGCAGACTGT | eekddddddddddkke | 92 | 1911 |
| 541883 | 218233 | 218248 | Intron 3 | GACAGTCCAGCTGCAA | eekddddddddddkke | 84 | 1912 |
| 541884 | 218526 | 218541 | Intron 3 | CCTGCGGCAGTGAAGA | eekddddddddddkke | 85 | 1913 |
| 541885 | 218734 | 218749 | Intron 3 | CTCTGAGGATAACCCT | eekddddddddddkke | 76 | 1914 |
| 541886 | 219342 | 219357 | Intron 3 | GTTCCCAGCTCCCCAA | eekddddddddddkke | 68 | 1915 |
| 541887 | 219618 | 219633 | Intron 3 | TAGGGTCAGTGTCCCA | eekddddddddddkke | 79 | 1916 |
| 541888 | 220039 | 220054 | Intron 3 | GGCGAGCCTCTCAGCC | eekddddddddddkke | 52 | 1917 |
| 541889 | 220393 | 220408 | Intron 3 | GACTCATCCAGGCAGT | eekddddddddddkke | 91 | 1918 |
| 541890 | 220665 | 220680 | Intron 3 | TCCCTCCCTTAGGCAC | eekddddddddddkke | 71 | 1919 |
| 541891 | 221044 | 221059 | Intron 3 | GAGGAGCCAGGCATAT | eekddddddddddkke | 80 | 1920 |
| 541892 | 221562 | 221577 | Intron 3 | CACCAACGAAGTCCCC | eekddddddddddkke | 89 | 1921 |
| 541893 | 221947 | 221962 | Intron 3 | GCTGGCAGTCACCAAA | eekddddddddddkke | 90 | 1922 |
| 541894 | 222569 | 222584 | Intron 3 | GCCCACACCATTGAGC | eekddddddddddkke | 70 | 1923 |
| 541895 | 222983 | 222998 | Intron 3 | AGTGAGATGCCCTGGT | eekddddddddddkke | 92 | 1924 |
| 541896 | 223436 | 223451 | Intron 3 | CACTGGCAGTTAGACC | eekddddddddddkke | 88 | 1925 |
| 541897 | 224107 | 224122 | Intron 3 | ACTCTGGCCACTAGTA | eekddddddddddkke | 80 | 1926 |
| 541898 | 224731 | 224746 | Intron 3 | GGTAGGGTGGCCACAT | eekddddddddddkke | 78 | 1927 |
| 541899 | 225133 | 225148 | Intron 3 | GAGCCATGTCTAGGCA | eekddddddddddkke | 18 | 1928 |
| 541900 | 225465 | 225480 | Intron 3 | CAGACTGAAACCCACC | eekddddddddddkke | 86 | 1929 |
| 541901 | 225671 | 225686 | Intron 3 | TATGGTCCAGCCACCA | eekddddddddddkke | 76 | 1930 |
| 541902 | 226110 | 226125 | Intron 3 | TACCTCCTCTGTTGGT | eekddddddddddkke | 36 | 1931 |
| 541903 | 227025 | 227040 | Intron 3 | ACACCTCAGTCATGAT | eekddddddddddkke | 92 | 1932 |
| 541904 | 227236 | 227251 | Intron 3 | AACAGGCTTCAAGAGG | eekddddddddddkke | 91 | 1933 |
| 541905 | 227485 | 227500 | Intron 3 | GTACTACTGGCCATGT | eekddddddddddkke | 73 | 1934 |
| 541906 | 227914 | 227929 | Intron 3 | CTGCAGGCGGTTGCTA | eekddddddddddkke | 60 | 1935 |
| 541907 | 228718 | 228733 | Intron 3 | GTCTGTTGCCAAGAGC | eekddddddddddkke | 95 | 1936 |
| 541908 | 229174 | 229189 | Intron 3 | CCCTGGGTCACTTAAG | eekddddddddddkke | 44 | 1937 |
| 541909 | 229423 | 229438 | Intron 3 | CCTGTCCTTGCTTGCA | eekddddddddddkke | 96 | 1938 |
| 541910 | 230042 | 230057 | Intron 3 | GCCCAGCTTATCCTAA | eekddddddddddkke | 78 | 1939 |
| 541911 | 230313 | 230328 | Intron 3 | AGTAGAGCCTTTGCCT | eekddddddddddkke | 75 | 1940 |
| 541912 | 230580 | 230595 | Intron 3 | CTGTCTCTTGGCCCAT | eekddddddddddkke | 80 | 1941 |
| 541913 | 231330 | 231345 | Intron 3 | GGCCCAAATCTTGAGT | eekddddddddddkke | 67 | 1942 |
| 541914 | 231817 | 231832 | Intron 3 | GCTTGTTACAGCACTA | eekddddddddddkke | 92 | 1943 |
| 541915 | 232088 | 232103 | Intron 3 | ACTTTGGCCCAGAGAT | eekddddddddddkke | 51 | 1944 |
| 541916 | 232884 | 232899 | Intron 3 | GCAGTCAGGTCAGCTG | eekddddddddddkke | 75 | 1945 |
| 541917 | 233210 | 233225 | Intron 3 | GCCTTGTCCTACTACC | eekddddddddddkke | 65 | 1946 |
| 541918 | 233657 | 233672 | Intron 3 | GGCTCTGCTATTGGCC | eekddddddddddkke | 59 | 1947 |
| 541919 | 233998 | 234013 | Intron 3 | CTTATAGAGCCTTGCC | eekddddddddddkke | 59 | 1948 |
| 541920 | 234296 | 234311 | Intron 3 | GGAAGGGCCCAAATAT | eekddddddddddkke | 15 | 1949 |
| 541921 | 234903 | 234918 | Intron 3 | GATCTACTCCTACTGC | eekddddddddddkke | 65 | 1950 |
| 541922 | 235313 | 235328 | Intron 3 | GTCAGCCTGTGTCTGA | eekddddddddddkke | 45 | 1951 |
| 541923 | 235770 | 235785 | Intron 3 | AGCTTCCTCCTTACAC | eekddddddddddkke | 54 | 1952 |
| 541924 | 236198 | 236213 | Intron 3 | CTGCTAAGCCCCTACC | eekddddddddddkke | 59 | 1953 |
| 541925 | 236684 | 236699 | Intron 3 | AGAGGTCAGGTGCATA | eekddddddddddkke | 77 | 1954 |
| 541926 | 237055 | 237070 | Intron 3 | TTCAGCCTGGTTGGGA | eekddddddddddkke | 71 | 1955 |
| 541927 | 237585 | 237600 | Intron 3 | GATTGATTGAGCTCCT | eekddddddddddkke | 86 | 1956 |
| 541928 | 237949 | 237964 | Intron 3 | ATGGACTCCCTAGGCT | eekddddddddddkke | 61 | 1957 |
| 541929 | 238542 | 238557 | Intron 3 | TACTCAAGGGCCCCTC | eekddddddddddkke | 67 | 1958 |
| 541930 | 245319 | 245334 | Intron 3 | GGCATATGTAGCTTGC | eekddddddddddkke | 91 | 1959 |
| 541931 | 245765 | 245780 | Intron 3 | GAGCTTAGATCTGTGC | eekddddddddddkke | 73 | 1960 |
| 541932 | 246251 | 246266 | Intron 3 | ATGCTCACGGCTGTGT | eekddddddddddkke | 81 | 1961 |
| 541933 | 246500 | 246515 | Intron 3 | ATTGAAAGGCCCATCA | eekddddddddddkke | 45 | 1962 |
| 541934 | 246936 | 246951 | Intron 3 | CAACCCAGTTTGCCGG | eekddddddddddkke | 71 | 1963 |
| 541935 | 247225 | 247240 | Intron 3 | CAGCTATTCCCTGTTT | eekddddddddddkke | 53 | 1964 |
| 541936 | 247644 | 247659 | Intron 3 | GCTGTGTCACACTTCC | eekddddddddddkke | 98 | 1965 |
| 541937 | 248223 | 248238 | Intron 3 | GTCCAAGGATCACAGC | eekddddddddddkke | 86 | 1966 |
| 541938 | 248695 | 248710 | Intron 3 | GCTACCACTAGAGCCT | eekddddddddddkke | 81 | 1967 |
| 541939 | 249494 | 249509 | Intron 3 | GTTTCAGGGCTTATGT | eekddddddddddkke | 63 | 1968 |
| 541940 | 250693 | 250708 | Intron 3 | TCCCACACCTATTGAA | eekddddddddddkke | 51 | 1969 |
| 541941 | 251622 | 251637 | Intron 3 | ACTGACTAGAGAGTCC | eekddddddddddkke | 81 | 1970 |
| 541942 | 251950 | 251965 | Intron 3 | TCCAAGGCTGATGTCC | eekddddddddddkke | 85 | 1971 |
| 541943 | 252665 | 252680 | Intron 3 | TCCCATGGTGGACATG | eekddddddddddkke | 39 | 1972 |
| 541944 | 253140 | 253155 | Intron 3 | AGTAGCTGGCAGAAGG | eekddddddddddkke | 85 | 1973 |
| 541945 | 253594 | 253609 | Intron 3 | CTGGGAGTGACTACTA | eekddddddddddkke | 77 | 1974 |
| 541946 | 254036 | 254051 | Intron 3 | TGGTATAGCTACTGGG | eekddddddddddkke | 84 | 1975 |
| 541947 | 254905 | 254920 | Intron 3 | CTGTGGTTTGGCAGGT | eekddddddddddkke | 90 | 1976 |
| 541948 | 255407 | 255422 | Intron 3 | GTTCTCACCTGAACTA | eekddddddddddkke | 65 | 1977 |
| 541949 | 255618 | 255633 | Intron 3 | ATAGGCTACTGGCAGG | eekddddddddddkke | 89 | 1978 |
| 541950 | 255992 | 256007 | Intron 3 | CCCAGCTAGCTGGAGT | eekddddddddddkke | 50 | 1979 |
| 541951 | 256428 | 256443 | Intron 3 | GGCTGGCTCTCAAAGG | eekddddddddddkke | 61 | 1980 |
| 541952 | 256689 | 256704 | Intron 3 | TGGTGATACTGTGGCA | eekddddddddddkke | 94 | 1981 |
| 541953 | 257317 | 257332 | Intron 3 | GCTGATTTTGGTGCCA | eekddddddddddkke | 92 | 1982 |
| 541954 | 257826 | 257841 | Intron 3 | GCTAATCTTGCCTCGA | eekddddddddddkke | 52 | 1983 |
| 541955 | 258407 | 258422 | Intron 3 | CACTGGTGGCTTTCAA | eekddddddddddkke | 31 | 1984 |

TABLE 182
Inhibition of GHR mRNA by deoxy, MOE and (S)-cEt gapmers
targeting intronic and exonic regions of SEQ ID NOs: 1 and 2

| | SEQ | | | | | SEQ ID | |
|---|---|---|---|---|---|---|---|
| | ID NO: | | | | | NO: 2 | SEQ |
| ISIS | 1 Start | Target | | | % | Start | ID |
| NO | Site | Region | Sequence | Chemistry | inhibition | Site | NO |
| 541262 | n/a | Intron 2 | TTGGTTTGTCAATCCT | eekddddddddddkke | 93 | 156891 | 1370 |
| 541956 | n/a | Intron 3 | GTCCCCTTCTTAAGCA | eekddddddddddkke | 56 | 258980 | 1985 |
| 541957 | n/a | Intron 3 | GCCAGGCCAACTGTGG | eekddddddddddkke | 53 | 259290 | 1986 |
| 541958 | n/a | Intron 3 | GGCCCGTTATGGTGGA | eekddddddddddkke | 72 | 259500 | 1987 |
| 541959 | n/a | Intron 3 | CCTAAAGTCCAACTCC | eekddddddddddkke | 76 | 261641 | 1988 |
| 541960 | n/a | Intron 3 | CCCTATCCAGCCTTCA | eekddddddddddkke | 77 | 262021 | 1989 |
| 541961 | n/a | Intron 3 | AAGCATGGCCTCTGGC | eekddddddddddkke | 23 | 262453 | 1990 |
| 541962 | n/a | Intron 3 | TACCCTGCACCCTCCT | eekddddddddddkke | 71 | 262764 | 1991 |
| 541963 | n/a | Intron 3 | TCCTTAGTAGAATGCC | eekddddddddddkke | 82 | 263342 | 1992 |
| 541964 | n/a | Intron 3 | TTAGCCCTGGGAGCAC | eekddddddddddkke | 78 | 263913 | 1993 |
| 541965 | n/a | Intron 3 | GCTGGGTCAGGTAGCG | eekddddddddddkke | 71 | 266503 | 1994 |
| 541966 | n/a | Intron 3 | GGGAGGCTCTCAATCT | eekddddddddddkke | 75 | 266861 | 1995 |
| 541967 | n/a | Intron 3 | GTAAGTGCAGAATGCC | eekddddddddddkke | 87 | 267116 | 1996 |
| 541968 | n/a | Intron 3 | TGCCGAGGCAGGCACC | eekddddddddddkke | 33 | 267380 | 1997 |
| 541969 | n/a | Intron 3 | TCCGTGTCTAGGAGGT | eekddddddddddkke | 84 | 267865 | 1998 |
| 541970 | n/a | Intron 4 | GTCTCCCTGCATTGGA | eekddddddddddkke | 31 | 268366 | 1999 |
| 541971 | n/a | Intron 4 | CCATATCACTCTCCTC | eekddddddddddkke | 79 | 268786 | 2000 |
| 541972 | n/a | Intron 4 | CGAACACCTTGAGCCA | eekddddddddddkke | 90 | 269252 | 2001 |
| 541973 | n/a | Intron 4 | GGCCCAGCTTAAGAGG | eekddddddddddkke | 59 | 270038 | 2002 |
| 541974 | n/a | Intron 4 | CTGATACTCCTAATCC | eekddddddddddkke | 70 | 270501 | 2003 |
| 541975 | n/a | Intron 4 | GCCTGTAGGGCTGTGC | eekddddddddddkke | 82 | 270817 | 2004 |
| 541976 | n/a | Intron 4 | TGCCCTTTCTCCCTAC | eekddddddddddkke | 87 | 271216 | 2005 |
| 541977 | n/a | Intron 4 | AGTGCATGTCAGTACC | eekddddddddddkke | 75 | 271812 | 2006 |
| 541978 | n/a | Intron 4 | TGCTCCTCAGCTGTTG | eekddddddddddkke | 44 | 272631 | 2007 |
| 541979 | n/a | Intron 4 | GTTTGGGACCATCCCT | eekddddddddddkke | 41 | 272834 | 2008 |
| 541980 | n/a | Intron 4 | AGTGCTCTCTAGGGTC | eekddddddddddkke | 87 | 273257 | 2009 |
| 541981 | n/a | Intron 4 | TACAGAGAATCACCCC | eekddddddddddkke | 82 | 273651 | 2010 |
| 541982 | n/a | Intron 4 | GTCCAAGTAAGGTGCT | eekddddddddddkke | 57 | 273947 | 2011 |
| 541983 | n/a | Intron 5 | GACCTTGCAGGCTTCC | eekddddddddddkke | 87 | 274244 | 2012 |
| 541984 | n/a | Intron 5 | GGGCAAAGGATCCTCT | eekddddddddddkke | 71 | 274758 | 2013 |
| 541985 | n/a | Intron 5 | CCCATTCTGCTATCCC | eekddddddddddkke | 92 | 275198 | 2014 |
| 541986 | n/a | Intron 5 | GCTGACTAGGAGGGCT | eekddddddddddkke | 62 | 275732 | 2015 |
| 541987 | n/a | Intron 5 | CCTGTGAGGTAGTACC | eekddddddddddkke | 83 | 276309 | 2016 |
| 541988 | n/a | Intron 5 | GTCCCCCTCCAGTCTA | eekddddddddddkke | 50 | 276932 | 2017 |
| 541989 | n/a | Intron 5 | GAGGACTCAATTCCTC | eekddddddddddkke | 0 | 277149 | 2018 |
| 541990 | n/a | Intron 5 | GACAAGGTCCTTTTGG | eekddddddddddkke | 43 | 277391 | 2019 |
| 541991 | n/a | Intron 5 | GCTCTTGTGTGCACCC | eekddddddddddkke | 90 | 277730 | 2020 |
| 541992 | n/a | Intron 5 | TCACCGCCTGCACCAC | eekddddddddddkke | 75 | 278342 | 2021 |
| 541993 | n/a | Intron 5 | GGTTGCACTGTGCAAT | eekddddddddddkke | 26 | 278917 | 2022 |
| 541994 | n/a | Intron 6 | TTCCACAGGCCTCCAT | eekddddddddddkke | 64 | 279303 | 2023 |
| 541995 | n/a | Intron 6 | GCTGAGTTCCATATGC | eekddddddddddkke | 72 | 279679 | 2024 |
| 541996 | n/a | Intron 6 | GAACCGCCACCTCAGG | eekddddddddddkke | 38 | 280157 | 2025 |
| 541997 | n/a | Intron 6 | GCTCACGGTTGGAGAC | eekddddddddddkke | 42 | 280799 | 2026 |
| 541998 | n/a | Intron 6 | TGGGCTCCCATGTTCA | eekddddddddddkke | 45 | 281595 | 2027 |
| 541999 | n/a | Intron 6 | TCACTCTACCAACCTC | eekddddddddddkke | 33 | 282572 | 2028 |
| 542000 | n/a | Intron 6 | TCCTTGCTTACAGATG | eekddddddddddkke | 33 | 283079 | 2029 |
| 542001 | n/a | Intron 6 | TGATGCTAGCATTACC | eekddddddddddkke | 37 | 283653 | 2030 |
| 542002 | n/a | Intron 6 | TGGGTAACTGGCTAGT | eekddddddddddkke | 47 | 285711 | 2031 |
| 542003 | n/a | Intron 6 | AACCATTCCTCACCAA | eekddddddddddkke | 53 | 287181 | 2032 |
| 542004 | n/a | Intron 6 | GCCCTGAACAGTTGAT | eekddddddddddkke | 37 | 287895 | 2033 |
| 542005 | n/a | Intron 6 | GGCTCCTATCATACCT | eekddddddddddkke | 38 | 288943 | 2034 |
| 542006 | n/a | Intron 6 | TAGGTCTCACAACCCT | eekddddddddddkke | 10 | 289638 | 2035 |
| 542007 | n/a | Intron 6 | GTGCATTAGTCTTCCA | eekddddddddddkke | 74 | 290035 | 2036 |
| 542008 | n/a | Intron 7 | CAAAAGCCAGGTTAGC | eekddddddddddkke | 13 | 290503 | 2037 |
| 542009 | n/a | Intron 7 | CTGCTGTTGACTACCT | eekddddddddddkke | 50 | 290924 | 2038 |
| 542010 | n/a | Intron 7 | GTACCTGCCAGCTACT | eekddddddddddkke | 35 | 291807 | 2039 |
| 542011 | n/a | Exon 8- | CCTACCTTTGCTGTTT | eekddddddddddkke | 12 | 292611 | 2040 |
| | | intron 8 | | | | | |
| | | junction | | | | | |
| 542012 | n/a | Intron 8 | AGTCACCAGCCTAAGC | eekddddddddddkke | 47 | 292860 | 2041 |
| 542013 | n/a | Intron 8 | AGGCAACCTGGGAGTG | eekddddddddddkke | 52 | 293377 | 2042 |
| 542014 | n/a | Intron 8 | TGGCCTTCACAATGGC | eekddddddddddkke | 33 | 294052 | 2043 |
| 542015 | n/a | Intron 8 | GGTGAAGTGGGTTGGA | eekddddddddddkke | 27 | 294536 | 2044 |
| 542016 | n/a | Intron 8 | GCTGGTTGTCTGCTGC | eekddddddddddkke | 60 | 294931 | 2045 |
| 542017 | n/a | Intron 8 | AGTTTGTGACCCCTGC | eekddddddddddkke | 81 | 295475 | 2046 |
| 542018 | n/a | Intron 8 | CCACTCAGTGTGAATG | eekddddddddddkke | 85 | 295955 | 2047 |
| 542019 | n/a | Intron 8 | CTGGCCTCAGGGCAAT | eekddddddddddkke | 51 | 296186 | 2048 |
| 542020 | n/a | Intron 8 | GTAGACTTGGGTAGGT | eekddddddddddkke | 53 | 296680 | 2049 |
| 542022 | n/a | 3′UTR | TGGTGCTAAGCTCTCC | eekddddddddddkke | 67 | 301009 | 2050 |
| 542023 | n/a | 3′UTR | CATGCTCAAGCTGGAA | eekddddddddddkke | 47 | 301280 | 2051 |
| 542024 | 206 | Exon 2 | AAGGTCAACAGCAGCT | eekddddddddddkke | 93 | 144990 | 2052 |
| 542025 | 207 | Exon 2 | CAAGGTCAACAGCAGC | eekddddddddddkke | 85 | 144991 | 2053 |
| 542026 | 208 | Exon 2 | CCAAGGTCAACAGCAG | eekddddddddddkke | 82 | 144992 | 2054 |
| 542027 | 209 | Exon 2 | GCCAAGGTCAACAGCA | eekddddddddddkke | 84 | 144993 | 2055 |

TABLE 183
Inhibition of GHR mRNA by deoxy, MOE and (S)-cEt gapmers
targeting intronic and exonic regions of SEQ ID NOs: 1 and 2

| | | | | | | SEQ | |
|---|---|---|---|---|---|---|---|
| | SEQ | | | | | ID | |
| | ID NO: | | | | | NO: 2 | |
| ISIS | 1 Start | Target | | | % | Start | SEQ |
| NO | Site | Region | Sequence | Chemistry | inhibition | Site | ID NO |
| 541262 | n/a | Intron 2 | TTGGTTTGTCAATCCT | eekddddddddddkke | 86 | 156891 | 1370 |
| 542034 | 870 | Exon 7 | TCTCACACGCACTTCA | eekddddddddddkke | 49 | 290368 | 2056 |
| 542035 | 871 | Exon 7 | ATCTCACACGCACTTC | eekddddddddddkke | 39 | 290369 | 2057 |
| 542036 | 872 | Exon 7 | GATCTCACACGCACTT | eekddddddddddkke | 50 | 290370 | 2058 |
| 542049 | n/a | Intron 1 | CTTTCATGAATCAAGC | eekddddddddddkke | 85 | 17928 | 2059 |
| 542050 | n/a | Intron 1 | TCTTTCATGAATCAAG | eekddddddddddkke | 54 | 17929 | 2060 |
| 542051 | n/a | Intron 1 | GTCTTTCATGAATCAA | eekddddddddddkke | 96 | 17930 | 2061 |
| 542052 | n/a | Intron 1 | GGTCTTTCATGAATCA | eekddddddddddkke | 98 | 17931 | 2062 |
| 542053 | n/a | Intron 1 | ATGGTCTTTCATGAAT | eekddddddddddkke | 94 | 17933 | 2063 |
| 542054 | n/a | Intron 1 | GATGGTCTTTCATGAA | eekddddddddddkke | 73 | 17934 | 2064 |
| 542055 | n/a | Intron 1 | TGATGGTCTTTCATGA | eekddddddddddkke | 83 | 17935 | 2065 |
| 542056 | n/a | Intron 1 | TATATCAATATTCTCC | eekddddddddddkke | 75 | 21821 | 2066 |
| 542057 | n/a | Intron 1 | TTATATCAATATTCTC | eekddddddddddkke | 23 | 21822 | 2067 |
| 542058 | n/a | Intron 1 | GTTATATCAATATTCT | eekddddddddddkke | 87 | 21823 | 2068 |
| 542059 | n/a | Intron 1 | TTTCTTTAGCAATAGT | eekddddddddddkke | 85 | 22519 | 2069 |
| 542060 | n/a | Intron 1 | CTTTCTTTAGCAATAG | eekddddddddddkke | 81 | 22520 | 2070 |
| 542061 | n/a | Intron 1 | GCTTTCTTTAGCAATA | eekddddddddddkke | 68 | 22521 | 2071 |
| 542062 | n/a | Intron 1 | CTCCATTAGGGTTCTG | eekddddddddddkke | 91 | 50948 | 2072 |
| 542063 | n/a | Intron 1 | TCTCCATTAGGGTTCT | eekddddddddddkke | 88 | 50949 | 2073 |
| 542064 | n/a | Intron 1 | TTCTCCATTAGGGTTC | eekddddddddddkke | 85 | 50950 | 2074 |
| 542065 | n/a | Intron 1 | GTTCTCCATTAGGGTT | eekddddddddddkke | 84 | 50951 | 2075 |
| 542066 | n/a | Intron 1 | AGGTTGGCAGACAGAC | eekddddddddddkke | 92 | 53467 | 2076 |
| 542067 | n/a | Intron 1 | CAGGTTGGCAGACAGA | eekddddddddddkke | 93 | 53468 | 2077 |
| 542068 | n/a | Intron 1 | GCAGGTTGGCAGACAG | eekddddddddddkke | 91 | 53469 | 2078 |
| 542069 | n/a | Intron 1 | CTTCTTGTGAGCTGGC | eekddddddddddkke | 95 | 64885 | 2079 |
| 542070 | n/a | Intron 1 | TCTTCTTGTGAGCTGG | eekddddddddddkke | 89 | 64886 | 2080 |
| 542071 | n/a | Intron 1 | GTCTTCTTGTGAGCTG | eekddddddddddkke | 96 | 64887 | 2081 |
| 542072 | n/a | Intron 1 | AGTCTTCTTGTGAGCT | eekddddddddddkke | 81 | 64888 | 2082 |
| 542073 | n/a | Intron 1 | TCTTCCACTCACATCC | eekddddddddddkke | 89 | 65991 | 2083 |
| 542074 | n/a | Intron 1 | CTCTTCCACTCACATC | eekddddddddddkke | 79 | 65992 | 2084 |
| 542075 | n/a | Intron 1 | TCTCTTCCACTCACAT | eekddddddddddkke | 86 | 65993 | 2085 |
| 542076 | n/a | Intron 1 | GTCTCTTCCACTCACA | eekddddddddddkke | 92 | 65994 | 2086 |
| 542077 | n/a | Intron 1 | ATAGATTTTGACTTCC | eekddddddddddkke | 86 | 72108 | 2087 |
| 542078 | n/a | Intron 1 | CATAGATTTTGACTTC | eekddddddddddkke | 42 | 72109 | 2088 |
| 542079 | n/a | Intron 1 | GCATAGATTTTGACTT | eekddddddddddkke | 66 | 72110 | 2089 |
| 542080 | n/a | Intron 1 | AAATGTCAACAGTGCA | eekddddddddddkke | 97 | 80639 | 2090 |
| 542081 | n/a | Intron 1 | CATGACTATGTTCTGG | eekddddddddddkke | 68 | 125595 | 2091 |
| 542082 | n/a | Intron 1 | ACATGACTATGTTCTG | eekddddddddddkke | 66 | 125596 | 2092 |
| 542083 | n/a | Intron 1 | CACATGACTATGTTCT | eekddddddddddkke | 74 | 125597 | 2093 |
| 542084 | n/a | Intron 2 | GAATTCTGAGCTCTGG | eekddddddddddkke | 91 | 145430 | 2094 |
| 542085 | n/a | Intron 2 | TGAATTCTGAGCTCTG | eekddddddddddkke | 94 | 145431 | 2095 |
| 542086 | n/a | Intron 2 | CTGAATTCTGAGCTCT | eekddddddddddkke | 94 | 145432 | 2096 |
| 542087 | n/a | Intron 2 | CCTGAATTCTGAGCTC | eekddddddddddkke | 93 | 145433 | 2097 |
| 542088 | n/a | Intron 2 | GCCTGAATTCTGAGCT | eekddddddddddkke | 87 | 145434 | 2098 |
| 542089 | n/a | Intron 2 | AGCCTGAATTCTGAGC | eekddddddddddkke | 84 | 145435 | 2099 |
| 542090 | n/a | Intron 2 | ATATTGTAATTCTTGG | eekddddddddddkke | 47 | 148060 | 2100 |
| 542091 | n/a | Intron 2 | GATATTGTAATTCTTG | eekddddddddddkke | 61 | 148061 | 2101 |
| 542092 | n/a | Intron 2 | TGATATTGTAATTCTT | eekddddddddddkke | 0 | 148062 | 2102 |
| 542093 | n/a | Intron 2 | CTGATATTGTAATTCT | eekddddddddddkke | 58 | 148063 | 2103 |
| 542094 | n/a | Intron 2 | CCTGATATTGTAATTC | eekddddddddddkke | 95 | 148064 | 2104 |
| 542095 | n/a | Intron 2 | GCCTGATATTGTAATT | eekddddddddddkke | 85 | 148065 | 2105 |
| 542096 | n/a | Intron 2 | TGCCTGATATTGTAAT | eekddddddddddkke | 86 | 148066 | 2106 |
| 542097 | n/a | Intron 2 | ATTATGTGCTTTGCCT | eekddddddddddkke | 86 | 148907 | 2107 |
| 542098 | n/a | Intron 2 | AATTATGTGCTTTGCC | eekddddddddddkke | 75 | 148908 | 2108 |
| 542099 | n/a | Intron 2 | CAATTATGTGCTTTGC | eekddddddddddkke | 88 | 148909 | 2109 |
| 542100 | n/a | Intron 2 | TCAATTATGTGCTTTG | eekddddddddddkke | 78 | 148910 | 2110 |
| 542101 | n/a | Intron 2 | GTCAATTATGTGCTTT | eekddddddddddkke | 97 | 148911 | 2111 |
| 542102 | n/a | Intron 2 | GCCATCACCAAACACC | eekddddddddddkke | 97 | 150973 | 2112 |
| 542103 | n/a | Intron 2 | TGCCATCACCAAACAC | eekddddddddddkke | 90 | 150974 | 2113 |
| 542104 | n/a | Intron 2 | TTGCCATCACCAAACA | eekddddddddddkke | 89 | 150975 | 2114 |
| 542105 | n/a | Intron 2 | TGGTGACTCTGCCTGA | eekddddddddddkke | 98 | 151388 | 2115 |
| 542106 | n/a | Intron 2 | CTGGTGACTCTGCCTG | eekddddddddddkke | 96 | 151389 | 2116 |
| 542107 | n/a | Intron 2 | GCTGGTGACTCTGCCT | eekddddddddddkke | 98 | 151390 | 2117 |
| 542108 | n/a | Intron 2 | TGCTGGTGACTCTGCC | eekddddddddddkke | 97 | 151391 | 2118 |
| 542109 | n/a | Intron 2 | CTGCTGGTGACTCTGC | eekddddddddddkke | 93 | 151392 | 2119 |

TABLE 184
Inhibition of GHR mRNA by deoxy, MOE and (S)-cEt
gapmers targeting introns 2 and 3 of SEQ ID NO: 2

| | SEQ | | | | | | |
|---|---|---|---|---|---|---|---|
| | ID | SEQ ID | | | | | |
| | NO: 2 | NO: 2 | | | | | |
| ISIS | Start | Stop | Target | | | % | SEQ |
| NO | Site | Site | Region | Sequence | Chemistry | inhibition | ID NO |
| 541262 | 156891 | 156906 | Intron 2 | TTGGTTTGTCAATCCT | eekddddddddddkke | 95 | 1370 |
| 542110 | 153002 | 153017 | Intron 2 | AGTAGTCAATATTATT | eekddddddddddkke | 74 | 2120 |
| 542111 | 153003 | 153018 | Intron 2 | CAGTAGTCAATATTAT | eekddddddddddkke | 55 | 2121 |
| 542112 | 153004 | 153019 | Intron 2 | CCAGTAGTCAATATTA | eekddddddddddkke | 97 | 2122 |
| 542113 | 153922 | 153937 | Intron 2 | CCTTTGGGTGAATAGC | eekddddddddddkke | 90 | 2123 |
| 542114 | 153923 | 153938 | Intron 2 | ACCTTTGGGTGAATAG | eekddddddddddkke | 71 | 2124 |
| 542115 | 153924 | 153939 | Intron 2 | CACCTTTGGGTGAATA | eekddddddddddkke | 78 | 2125 |
| 542116 | 155595 | 155610 | Intron 2 | CAACTTGAGGACAATA | eekddddddddddkke | 89 | 2126 |
| 542118 | 155597 | 155612 | Intron 2 | CTCAACTTGAGGACAA | eekddddddddddkke | 98 | 2127 |
| 542119 | 156395 | 156410 | Intron 2 | CAGGAAGAAAGGAACC | eekddddddddddkke | 95 | 2128 |
| 542120 | 156396 | 156411 | Intron 2 | CCAGGAAGAAAGGAAC | eekddddddddddkke | 83 | 2129 |
| 542121 | 156397 | 156412 | Intron 2 | ACCAGGAAGAAAGGAA | eekddddddddddkke | 90 | 2130 |
| 542122 | 156595 | 156610 | Intron 2 | TGCAGTCATGTACACA | eekddddddddddkke | 97 | 2131 |
| 542123 | 156596 | 156611 | Intron 2 | CTGCAGTCATGTACAC | eekddddddddddkke | 90 | 2132 |
| 542124 | 156597 | 156612 | Intron 2 | TCTGCAGTCATGTACA | eekddddddddddkke | 81 | 2133 |
| 542125 | 156890 | 156905 | Intron 2 | TGGTTTGTCAATCCTT | eekddddddddddkke | 97 | 2134 |
| 542126 | 156892 | 156907 | Intron 2 | CTTGGTTTGTCAATCC | eekddddddddddkke | 99 | 2135 |
| 542127 | 157204 | 157219 | Intron 2 | GCTACAATGCACAGGA | eekddddddddddkke | 98 | 2136 |
| 542128 | 157205 | 157220 | Intron 2 | TGCTACAATGCACAGG | eekddddddddddkke | 98 | 2137 |
| 542129 | 158008 | 158023 | Intron 2 | GATATTTATTGCTGTA | eekddddddddddkke | 61 | 2138 |
| 542130 | 158009 | 158024 | Intron 2 | TGATATTTATTGCTGT | eekddddddddddkke | 41 | 2139 |
| 542131 | 158010 | 158025 | Intron 2 | CTGATATTTATTGCTG | eekddddddddddkke | 86 | 2140 |
| 542132 | 162752 | 162767 | Intron 2 | AGGGTCTTTACAAAGT | eekddddddddddkke | 69 | 2141 |
| 542133 | 162753 | 162768 | Intron 2 | CAGGGTCTTTACAAAG | eekddddddddddkke | 71 | 2142 |
| 542134 | 162754 | 162769 | Intron 2 | CCAGGGTCTTTACAAA | eekddddddddddkke | 93 | 2143 |
| 542135 | 166353 | 166368 | Intron 2 | TTCTGCAGTATCCTAG | eekddddddddddkke | 84 | 2144 |
| 542136 | 166354 | 166369 | Intron 2 | TTTCTGCAGTATCCTA | eekddddddddddkke | 88 | 2145 |
| 542137 | 166355 | 166370 | Intron 2 | GTTTCTGCAGTATCCT | eekddddddddddkke | 95 | 2146 |
| 542138 | 166356 | 166371 | Intron 2 | AGTTTCTGCAGTATCC | eekddddddddddkke | 92 | 2147 |
| 542139 | 166357 | 166372 | Intron 2 | CAGTTTCTGCAGTATC | eekddddddddddkke | 93 | 2148 |
| 542140 | 172747 | 172762 | Intron 2 | CAAATTCCAGTCCTAG | eekddddddddddkke | 73 | 2149 |
| 542141 | 172748 | 172763 | Intron 2 | CCAAATTCCAGTCCTA | eekddddddddddkke | 91 | 2150 |
| 542142 | 172749 | 172764 | Intron 2 | TCCAAATTCCAGTCCT | eekddddddddddkke | 90 | 2151 |
| 542143 | 175372 | 175387 | Intron 2 | ACCCATTTCATCCATT | eekddddddddddkke | 94 | 2152 |
| 542144 | 175373 | 175388 | Intron 2 | AACCCATTTCATCCAT | eekddddddddddkke | 93 | 2153 |
| 542145 | 175374 | 175389 | Intron 2 | GAACCCATTTCATCCA | eekddddddddddkke | 97 | 2154 |
| 542146 | 175375 | 175390 | Intron 2 | GGAACCCATTTCATCC | eekddddddddddkke | 96 | 2155 |
| 542147 | 175376 | 175391 | Intron 2 | AGGAACCCATTTCATC | eekddddddddddkke | 68 | 2156 |
| 542148 | 189120 | 189135 | Intron 2 | GCTTCATGTCTTTCTA | eekddddddddddkke | 90 | 2157 |
| 542149 | 189121 | 189136 | Intron 2 | TGCTTCATGTCTTTCT | eekddddddddddkke | 96 | 2158 |
| 542150 | 189122 | 189137 | Intron 2 | GTGCTTCATGTCTTTC | eekddddddddddkke | 97 | 2159 |
| 542151 | 189485 | 189500 | Intron 2 | TGAGCTTAGCAGTCAC | eekddddddddddkke | 92 | 2160 |
| 542152 | 189486 | 189501 | Intron 2 | ATGAGCTTAGCAGTCA | eekddddddddddkke | 95 | 2161 |
| 542153 | 189487 | 189502 | Intron 2 | CATGAGCTTAGCAGTC | eekddddddddddkke | 95 | 2162 |
| 542154 | 191143 | 191158 | Intron 2 | TACAGACATAGCTCTA | eekddddddddddkke | 91 | 2163 |
| 542155 | 191144 | 191159 | Intron 2 | ATACAGACATAGCTCT | eekddddddddddkke | 74 | 2164 |
| 542156 | 191145 | 191160 | Intron 2 | GATACAGACATAGCTC | eekddddddddddkke | 91 | 2165 |
| 542157 | 191146 | 191161 | Intron 2 | GGATACAGACATAGCT | eekddddddddddkke | 94 | 2166 |
| 542158 | 198149 | 198164 | Intron 2 | TGTGGCTTTAATTCAC | eekddddddddddkke | 71 | 2167 |
| 542159 | 198150 | 198165 | Intron 2 | ATGTGGCTTTAATTCA | eekddddddddddkke | 81 | 2168 |
| 542160 | 198151 | 198166 | Intron 2 | TATGTGGCTTTAATTC | eekddddddddddkke | 78 | 2169 |
| 542161 | 199817 | 199832 | Intron 2 | TGTTCAGTTGCATCAC | eekddddddddddkke | 91 | 2170 |
| 542162 | 199818 | 199833 | Intron 2 | GTGTTCAGTTGCATCA | eekddddddddddkke | 89 | 2171 |
| 542163 | 199819 | 199834 | Intron 2 | TGTGTTCAGTTGCATC | eekddddddddddkke | 90 | 2172 |
| 542164 | 210562 | 210577 | Intron 3 | CATCTGGATGTGAGGC | eekddddddddddkke | 90 | 2173 |
| 542165 | 210563 | 210578 | Intron 3 | ACATCTGGATGTGAGG | eekddddddddddkke | 78 | 2174 |
| 542166 | 210564 | 210579 | Intron 3 | CACATCTGGATGTGAG | eekddddddddddkke | 55 | 2175 |
| 542167 | 219020 | 219035 | Intron 3 | TCAGGTAATTTCTGGA | eekddddddddddkke | 82 | 2176 |
| 542168 | 219021 | 219036 | Intron 3 | CTCAGGTAATTTCTGG | eekddddddddddkke | 73 | 2177 |
| 542169 | 219022 | 219037 | Intron 3 | TCTCAGGTAATTTCTG | eekddddddddddkke | 40 | 2178 |
| 542170 | 225568 | 225583 | Intron 3 | TGCTTATTTACCTGGG | eekddddddddddkke | 90 | 2179 |
| 542171 | 225569 | 225584 | Intron 3 | TTGCTTATTTACCTGG | eekddddddddddkke | 90 | 2180 |
| 542172 | 225570 | 225585 | Intron 3 | TTTGCTTATTTACCTG | eekddddddddddkke | 79 | 2181 |
| 542173 | 225571 | 225586 | Intron 3 | TTTTGCTTATTTACCT | eekddddddddddkke | 32 | 2182 |
| 542174 | 229619 | 229634 | Intron 3 | ATGATGTTACTACTAC | eekddddddddddkke | 63 | 2183 |
| 542175 | 229620 | 229635 | Intron 3 | AATGATGTTACTACTA | eekddddddddddkke | 53 | 2184 |
| 542176 | 229621 | 229636 | Intron 3 | CAATGATGTTACTACT | eekddddddddddkke | 12 | 2185 |
| 542177 | 232827 | 232842 | Intron 3 | CCCCTAGAGCAATGGT | eekddddddddddkke | 76 | 2186 |
| 542178 | 232828 | 232843 | Intron 3 | CCCCCTAGAGCAATGG | eekddddddddddkke | 83 | 2187 |
| 542179 | 232829 | 232844 | Intron 3 | TCCCCCTAGAGCAATG | eekddddddddddkke | 49 | 2188 |
| 542180 | 237676 | 237691 | Intron 3 | TCAATTGCAGATGCTC | eekddddddddddkke | 88 | 2189 |
| 542181 | 237677 | 237692 | Intron 3 | CTCAATTGCAGATGCT | eekddddddddddkke | 90 | 2190 |
| 542182 | 237678 | 237693 | Intron 3 | GCTCAATTGCAGATGC | eekddddddddddkke | 81 | 2191 |
| 542183 | 237679 | 237694 | Intron 3 | AGCTCAATTGCAGATG | eekddddddddddkke | 85 | 2192 |
| 542184 | 248232 | 248247 | Intron 3 | GTATATTCAGTCCAAG | eekddddddddddkke | 90 | 2193 |
| 542185 | 248233 | 248248 | Intron 3 | AGTATATTCAGTCCAA | eekddddddddddkke | 94 | 2194 |
| 542186 | 248234 | 248249 | Intron 3 | CAGTATATTCAGTCCA | eekddddddddddkke | 97 | 2195 |

TABLE 185
Inhibition of GHR mRNA by deoxy, MOE and (S)-cEt gapmers
targeting intronic and exonic regions of SEQ ID NOs: 1 and 2

| | SEQ | | | | | | |
|---|---|---|---|---|---|---|---|
| | ID | | | | | | |
| | NO: 1 | | | | | SEQ ID | |
| ISIS | Start | | | | % | NO: 2 | SEQ ID |
| NO | Site | Target Region | Sequence | Chemistry | inhibition | Start Site | NO |
| 541262 | n/a | Intron 2 | TTGGTTTGTCAATCCT | eekddddddddddkke | 93 | 156891 | 1370 |
| 545316 | 168 | exon 1-intron 1 | ACCTCCGAGCTTCGCC | eekddddddddddkke | 80 | 3044 | 2196 |
| | | junction | | | | | |
| 545317 | 173 | exon-exon | GTAGGACCTCCGAGCT | eekddddddddddkke | 74 | n/a | 2197 |
| | | junction | | | | | |
| 545318 | 177 | exon-exon | ACCTGTAGGACCTCCG | eekddddddddddkke | 70 | n/a | 2198 |
| | | junction | | | | | |
| 545321 | 213 | Exon 2 | CAGTGCCAAGGTCAAC | eekddddddddddkke | 77 | 144997 | 2199 |
| 545322 | 225 | Exon 2 | ACTTGATCCTGCCAGT | eekddddddddddkke | 36 | 145009 | 2200 |
| 545332 | 361 | Exon 4/Intron 3 | CTCGCTCAGGTGAACG | eekddddddddddkke | 57 | 268024 | 2201 |
| 545333 | 366 | Exon 4/Intron 3 | AGTCTCTCGCTCAGGT | eekddddddddddkke | 88 | 268029 | 2202 |
| 545337 | 444 | Exon 4-intron 4 | CCTTCTGGTATAGAAC | eekddddddddddkke | 21 | 268107 | 2203 |
| | | junction | | | | | |
| 545340 | 570 | Exon 5 | GCTAGTTAGCTTGATA | eekddddddddddkke | 39 | 274130 | 2204 |
| 545343 | 626 | exon 3-exon 4 | TCTGGTTGCACTATTT | eekddddddddddkke | 34 | n/a | 2205 |
| | | junction | | | | | |
| 545344 | 629 | exon 3-exon 4 | GGATCTGGTTGCACTA | eekddddddddddkke | 30 | n/a | 2206 |
| | | junction | | | | | |
| 545345 | 632 | Exon 6 | GGTGGATCTGGTTGCA | eekddddddddddkke | 18 | 278926 | 2207 |
| 545346 | 638 | Exon 6 | GCAATGGGTGGATCTG | eekddddddddddkke | 50 | 278932 | 2208 |
| 545347 | 647 | Exon 6 | CAGTTGAGGGCAATGG | eekddddddddddkke | 71 | 278941 | 2209 |
| 545348 | 651 | Exon 6 | AGTCCAGTTGAGGGCA | eekddddddddddkke | 58 | 278945 | 2210 |
| 545349 | 655 | Exon 6 | GTAAAGTCCAGTTGAG | eekddddddddddkke | 34 | 278949 | 2211 |
| 545350 | 660 | Exon 6 | GTTCAGTAAAGTCCAG | eekddddddddddkke | 52 | 278954 | 2212 |
| 545351 | 685 | Exon 6 | CTGCATGAATCCCAGT | eekddddddddddkke | 77 | 278979 | 2213 |
| 545355 | 923 | Exon 7 | ACATAGAGCACCTCAC | eekddddddddddkke | 38 | 290421 | 2214 |
| 545356 | 926 | Exon 7 | GTTACATAGAGCACCT | eekddddddddddkke | 79 | 290424 | 2215 |
| 545357 | 929 | Exon 7 | AGTGTTACATAGAGCA | eekddddddddddkke | 70 | 290427 | 2216 |
| 545362 | 1124 | Exon 7-exon 8 | TCCTTGAGGAGATCTG | eekddddddddddkke | 3 | n/a | 2217 |
| | | junction | | | | | |
| 545363 | 1170 | Exon 10 | GCTATCATGAATGGCT | eekddddddddddkke | 69 | 297587 | 2218 |
| 545364 | 1180 | Exon 10 | CGGGTTTATAGCTATC | eekddddddddddkke | 58 | 297597 | 2219 |
| 545369 | 1320 | Exon 10 | ATCCTTCACCCCTAGG | eekddddddddddkke | 46 | 297737 | 2220 |
| 545370 | 1328 | Exon 10 | GAGTCGCCATCCTTCA | eekddddddddddkke | 60 | 297745 | 2221 |
| 545371 | 1332 | Exon 10 | TCCAGAGTCGCCATCC | eekddddddddddkke | 51 | 297749 | 2222 |
| 545373 | 1418 | Exon 10 | GGCTGAGCAACCTCTG | eekddddddddddkke | 80 | 297835 | 2223 |
| 545374 | 1422 | Exon 10 | CTGTGGCTGAGCAACC | eekddddddddddkke | 63 | 297839 | 2224 |
| 545380 | 1524 | Exon 10 | GATAACACTGGGCTGC | eekddddddddddkke | 60 | 297941 | 2225 |
| 545381 | 1530 | Exon 10 | TGCTTGGATAACACTG | eekddddddddddkke | 76 | 297947 | 2226 |
| 545382 | 1533 | Exon 10 | CTCTGCTTGGATAACA | eekddddddddddkke | 60 | 297950 | 2227 |
| 545386 | 1600 | Exon 10 | GCTGAATATGGGCAGC | eekddddddddddkke | 29 | 298017 | 2228 |
| 545387 | 1613 | Exon 10 | CTTGGATTGCTTAGCT | eekddddddddddkke | 59 | 298030 | 2229 |
| 545388 | 1645 | Exon 10 | CCTGGGCATAAAAGTC | eekddddddddddkke | 47 | 298062 | 2230 |
| 545392 | 1832 | Exon 10 | ACCTTGATGTGAGGAG | eekddddddddddkke | 44 | 298249 | 2231 |

TABLE 186
Inhibition of GHR mRNA by deoxy, MOE and (S)-cEt gapmers
targeting intronic and exonic regions of SEQ ID NOs: 1 and 2

| | SEQ | | | | | SEQ | |
|---|---|---|---|---|---|---|---|
| | ID | | | | | ID | |
| | NO: 1 | | | | | NO: 2 | |
| ISIS | Start | Target | | | % | Start | |
| NO | Site | Region | Sequence | Chemistry | inhibition | Site | SEQ ID NO |
| 541262 | n/a | Intron 2 | TTGGTTTGTCAATCCT | eekddddddddddkke | 89 | 156891 | 1370 |
| 545393 | 1838 | Exon 10 | GATTCAACCTTGATGT | eekddddddddddkke | 40 | 298255 | 2232 |
| 545394 | 1844 | Exon 10 | ATGTGTGATTCAACCT | eekddddddddddkke | 80 | 298261 | 2233 |
| 545395 | 1956 | Exon 10 | TGGGACAGGCATCTCA | eekddddddddddkke | 29 | 298373 | 2234 |
| 545396 | 1961 | Exon 10 | TAGTCTGGGACAGGCA | eekddddddddddkke | 48 | 298378 | 2235 |
| 545397 | 1968 | Exon 10 | GGAGGTATAGTCTGGG | eekddddddddddkke | 61 | 298385 | 2236 |
| 545398 | 1986 | Exon 10 | GGACTGTACTATATGA | eekddddddddddkke | 48 | 298403 | 2237 |
| 545401 | 2077 | Exon 10 | TCAGTTGGTCTGTGCT | eekddddddddddkke | 60 | 298494 | 2238 |
| 545402 | 2095 | Exon 10 | GCTAAGGCATGATTTT | eekddddddddddkke | 53 | 298512 | 2239 |
| 545406 | 2665 | Exon 10 | GCCATGCTTGAAGTCT | eekddddddddddkke | 87 | 299082 | 2240 |
| 545407 | 2668 | Exon 10 | ATAGCCATGCTTGAAG | eekddddddddddkke | 70 | 299085 | 2241 |
| 545408 | 2692 | Exon 10 | ACACAGTGTGTAGTGT | eekddddddddddkke | 60 | 299109 | 2242 |
| 545409 | 2699 | Exon 10 | CTGCAGTACACAGTGT | eekddddddddddkke | 31 | 299116 | 2243 |
| 545410 | 2704 | Exon 10 | ACCAACTGCAGTACAC | eekddddddddddkke | 57 | 299121 | 2244 |
| 545411 | 2739 | Exon 10 | TAGACTGTAGTTGCTA | eekddddddddddkke | 53 | 299156 | 2245 |
| 545412 | 2747 | Exon 10 | ACCAGCTTTAGACTGT | eekddddddddddkke | 56 | 299164 | 2246 |
| 545413 | 2945 | Exon 10 | GTAAGTTGATCTGTGC | eekddddddddddkke | 79 | 299362 | 2247 |
| 545414 | 2963 | Exon 10 | TACTTCTTTTGGTGCC | eekddddddddddkke | 82 | 299380 | 2248 |
| 545416 | 3212 | Exon 10 | TCTTGTACCTTATTCC | eekddddddddddkke | 73 | 299629 | 2249 |
| 545417 | 3306 | Exon 10 | TGGTTATAGGCTGTGA | eekddddddddddkke | 90 | 299723 | 2250 |
| 545418 | 3309 | Exon 10 | GTCTGGTTATAGGCTG | eekddddddddddkke | 88 | 299726 | 2251 |
| 545419 | 3313 | Exon 10 | ATGTGTCTGGTTATAG | eekddddddddddkke | 68 | 299730 | 2252 |
| 545420 | 3317 | Exon 10 | GAGTATGTGTCTGGTT | eekddddddddddkke | 84 | 299734 | 2253 |
| 545421 | 4049 | Exon 10 | GGTCTGCGATAAATGG | eekddddddddddkke | 69 | 300466 | 2254 |
| 545429 | 4424 | Exon 10 | GCCAGACACAACTAGT | eekddddddddddkke | 59 | 300841 | 2255 |
| 545430 | 31 | Exon 1 | ACCGCCACTGTAGCAG | eekddddddddddkke | 76 | 2907 | 2256 |
| 545431 | 36 | Exon 1 | CCGCCACCGCCACTGT | eekddddddddddkke | 94 | 2912 | 2257 |
| 545432 | 103 | Exon 1 | GGGCCTCCGGCCCGCG | eekddddddddddkke | 22 | 2979 | 2258 |
| 545433 | 143 | Exon 1 | AGAGCGCGGGTTCGCG | eekddddddddddkke | 61 | 3019 | 2259 |
| 545434 | n/a | Intron | TACTGACCCCAGTTCC | eekddddddddddkke | 68 | 3654 | 2260 |
| | | 1/Exon 1 | | | | | |
| 545435 | n/a | Intron | ACTCTACTGACCCCAG | eekddddddddddkke | 70 | 3658 | 2261 |
| | | 1/Exon 1 | | | | | |
| 545436 | n/a | Intron | GTCACTCTACTGACCC | eekddddddddddkke | 83 | 3661 | 2262 |
| | | 1/Exon 1 | | | | | |
| 545437 | n/a | Intron | TTCATGCGGACTGGTG | eekddddddddddkke | 68 | 3680 | 2263 |
| | | 1/Exon 1 | | | | | |
| 545438 | n/a | Intron | GTGAGCATGGACCCCA | eekddddddddddkke | 94 | 225436 | 2264 |
| | | 3/Exon 3 | | | | | |
| 545439 | n/a | Intron | TGATATGTGAGCATGG | eekddddddddddkke | 88 | 225442 | 2265 |
| | | 3/Exon 3 | | | | | |
| 545440 | n/a | Intron | AAGTTGGTGAGCTTCT | eekddddddddddkke | 85 | 226785 | 2266 |
| | | 3/Exon 3 | | | | | |
| 545441 | n/a | Intron | CCTTCAAGTTGGTGAG | eekddddddddddkke | 88 | 226790 | 2267 |
| | | 3/Exon 3 | | | | | |
| 545442 | n/a | Intron | GTAAGATCCTTTTGCC | eekddddddddddkke | 70 | 226883 | 2268 |
| | | 3/Exon 3 | | | | | |
| 545443 | n/a | Intron | CAGCTGTGCAACTTGC | eekddddddddddkke | 50 | 238345 | 2269 |
| | | 3/Exon 3 | | | | | |
| 545444 | n/a | Intron | GCCTTGGTAGGTAGGG | eekddddddddddkke | 68 | 238422 | 2270 |
| | | 3/Exon 3 | | | | | |
| 545445 | n/a | Intron | AGAGCCTTGGTAGGTA | eekddddddddddkke | 85 | 238425 | 2271 |
| | | 3/Exon 3 | | | | | |
| 545446 | n/a | Intron | CCCGCACAAACGCGCA | eekddddddddddkke | 10 | 3614 | 2272 |
| | | 1/Exon 1 | | | | | |
| 545447 | n/a | Intron | GTCTTCAAGGTCAGTT | eekddddddddddkke | 92 | 93208 | 2273 |
| | | 1/Exon 1 | | | | | |
| 545448 | n/a | Intron | GCCCAGTGAATTCAGC | eekddddddddddkke | 76 | 93246 | 2274 |
| | | 1/Exon 1 | | | | | |
| 545449 | n/a | Intron | AGATGCGCCCAGTGAA | eekddddddddddkke | 60 | 93252 | 2275 |
| | | 1/Exon 1 | | | | | |
| 545450 | n/a | Intron | GTAAGATGCGCCCAGT | eekddddddddddkke | 78 | 93255 | 2276 |
| | | 1/Exon 1 | | | | | |
| 545451 | n/a | Intron | CCAGAAGGCACTTGTA | eekddddddddddkke | 42 | 93301 | 2277 |
| | | 1/Exon 1 | | | | | |
| 545452 | n/a | Intron | GGAAGATTTGCAGAAC | eekddddddddddkke | 15 | 93340 | 2278 |
| | | 1/Exon 1 | | | | | |
| 545453 | n/a | Intron | CCTTGGTCATGGAAGA | eekddddddddddkke | 35 | 93350 | 2279 |
| | | 1/Exon 1 | | | | | |
| 545454 | n/a | Intron | TGACCTTGGTCATGGA | eekddddddddddkke | 55 | 93353 | 2280 |
| | | 1/Exon 1 | | | | | |
| 545455 | n/a | Intron | GAGGTGACCTTGGTCA | eekddddddddddkke | 70 | 93357 | 2281 |
| | | 1/Exon 1 | | | | | |
| 545456 | n/a | Intron | ATCCAAAGAGGTGACC | eekddddddddddkke | 41 | 93364 | 2282 |
| | | 1/Exon 1 | | | | | |
| 545457 | n/a | Intron | GCCAATCCAAAGAGGT | eekddddddddddkke | 56 | 93368 | 2283 |
| | | 1/Exon 1 | | | | | |
| 545458 | n/a | Intron | GGTCTGCCAATCCAAA | eekddddddddddkke | 79 | 93373 | 2284 |
| | | 1/Exon 1 | | | | | |
| 545459 | n/a | Intron | CCCTGGGTCTGCCAAT | eekddddddddddkke | 68 | 93378 | 2285 |
| | | 1/Exon 1 | | | | | |
| 545460 | n/a | Intron | GAGATCTCAACAAGGG | eekddddddddddkke | 52 | 93427 | 2286 |
| | | 1/Exon 1 | | | | | |
| 545461 | n/a | Intron | CGCCCATCACTCTTCC | eekddddddddddkke | 68 | 93988 | 2287 |
| | | 1/Exon 1 | | | | | |
| 545462 | n/a | Intron | CACCTGTCGCCCATCA | eekddddddddddkke | 67 | 93995 | 2288 |
| | | 1/Exon 1 | | | | | |
| 545463 | n/a | Intron | CATCACCTGTCGCCCA | eekddddddddddkke | 78 | 93998 | 2289 |
| | | 1/Exon 1 | | | | | |
| 545464 | n/a | Intron | CACCATCACCTGTCGC | eekddddddddddkke | 74 | 94001 | 2290 |
| | | 1/Exon 1 | | | | | |
| 545465 | n/a | Intron | AATAGTTGTCACCATC | eekddddddddddkke | 76 | 94010 | 2291 |
| | | 1/Exon 1 | | | | | |
| 545466 | n/a | Intron | GCCACCTTTCATGAGA | eekddddddddddkke | 58 | 94048 | 2292 |
| | | 1/Exon 1 | | | | | |
| 545467 | n/a | Intron | CTCTTGGAAGTAGGTA | eekddddddddddkke | 89 | 198762 | 2293 |
| | | 2/Exon 2 | | | | | |
| 545468 | n/a | Intron | GTTCTCTTGGAAGTAG | eekddddddddddkke | 80 | 198765 | 2294 |
| | | 2/Exon 2 | | | | | |
| 545469 | n/a | Intron | TAAACAGGTTGGTCTG | eekddddddddddkke | 68 | 198854 | 2295 |
| | | 2/Exon 2 | | | | | |

### Example 121: Dose-Dependent Antisense Inhibition of Human GHR in Hep3B Cells by Deoxy, MOE and (S)-cEt Gapmers

[1127] Gapmers from studies described above exhibiting significant in vitro inhibition of GHR mRNA were selected and tested at various doses in Hep3B cells. The antisense oligonucleotides were tested in a series of experiments that had similar culture conditions. The results for each experiment are presented in separate tables shown below. Cells were plated at a density of 20,000 cells per well and transfected using electroporation with 0.625 μM, 1.25 μM, 2.50 μM, 5.00 μM and 10.00 μM concentrations of antisense oligonucleotide. After a treatment period of approximately 16 hours, RNA was isolated from the cells and GHR mRNA levels were measured by quantitative real-time PCR. Human primer probe set RTS3437_MGB was used to measure mRNA levels. GHR mRNA levels were adjusted according to total RNA content, as measured by RIBOGREEN®. Results are presented as percent inhibition of GHR, relative to untreated control cells.

[1128] The half maximal inhibitory concentration (IC₅₀) of each oligonucleotide is also presented. GHR mRNA levels were significantly reduced in a dose-dependent manner in antisense oligonucleotide treated cells.

TABLE 187

| | 0.625 | 1.250 | 2.50 | 5.00 | 10.00 | IC₅₀ |
|---|---|---|---|---|---|---|
| ISIS No | μM | μM | μM | μM | μM | (μM) |
| 541396 | 30 | 51 | 68 | 74 | 67 | 1.4 |
| 541262 | 55 | 87 | 90 | 94 | 97 | 0.2 |
| 541393 | 30 | 38 | 52 | 66 | 81 | 2.1 |
| 541375 | 41 | 45 | 54 | 64 | 79 | 1.6 |
| 541438 | 44 | 49 | 75 | 80 | 91 | 0.9 |
| 541428 | 35 | 32 | 56 | 78 | 88 | 1.8 |
| 541491 | 13 | 46 | 67 | 55 | 95 | 2.0 |
| 541435 | 21 | 46 | 55 | 72 | 94 | 1.9 |
| 541471 | 11 | 49 | 50 | 77 | 89 | 2.0 |
| 541430 | 24 | 44 | 56 | 57 | 79 | 2.2 |
| 541492 | 32 | 40 | 65 | 80 | 85 | 1.5 |
| 541431 | 22 | 46 | 73 | 84 | 92 | 1.5 |

TABLE 188

| | 0.625 | 1.250 | 2.50 | 5.00 | 10.00 | IC₅₀ |
|---|---|---|---|---|---|---|
| ISIS No | μM | μM | μM | μM | μM | (μM) |
| 541487 | 36 | 46 | 66 | 85 | 92 | 1.3 |
| 541423 | 33 | 55 | 64 | 80 | 93 | 1.2 |
| 541452 | 37 | 60 | 79 | 87 | 94 | 0.9 |
| 541505 | 51 | 75 | 86 | 92 | 97 | 0.4 |
| 541522 | 54 | 76 | 81 | 90 | 95 | 0.3 |
| 541539 | 65 | 76 | 85 | 94 | 98 | 0.2 |
| 541503 | 54 | 65 | 80 | 93 | 97 | 0.5 |
| 541520 | 43 | 61 | 86 | 94 | 96 | 0.7 |
| 541515 | 57 | 72 | 85 | 92 | 94 | 0.3 |
| 541564 | 57 | 72 | 88 | 90 | 97 | 0.3 |
| 541554 | 43 | 65 | 81 | 89 | 93 | 0.7 |
| 541509 | 11 | 8 | 19 | 6 | 8 | >10 |
| 541584 | 59 | 65 | 84 | 91 | 96 | 0.3 |
| 541585 | 70 | 80 | 93 | 92 | 98 | 0.1 |

TABLE 189

| | 0.625 | 1.250 | 2.50 | 5.00 | 10.00 | IC₅₀ |
|---|---|---|---|---|---|---|
| ISIS No | μM | μM | μM | μM | μM | (μM) |
| 541598 | 26 | 43 | 75 | 80 | 76 | 1.5 |
| 541592 | 35 | 48 | 67 | 85 | 95 | 1.2 |
| 541641 | 22 | 63 | 70 | 91 | 93 | 1.2 |
| 541590 | 27 | 59 | 70 | 94 | 95 | 1.2 |
| 541615 | 40 | 65 | 84 | 88 | 94 | 0.7 |
| 541595 | 35 | 57 | 73 | 84 | 95 | 1.0 |
| 541575 | 49 | 60 | 79 | 84 | 95 | 0.6 |
| 541571 | 41 | 50 | 76 | 80 | 94 | 1.0 |
| 541582 | 0 | 10 | 25 | 50 | 82 | 4.4 |
| 541262 | 66 | 79 | 93 | 94 | 99 | <0.6 |
| 541652 | 1 | 44 | 80 | 82 | 87 | 1.9 |
| 541670 | 29 | 40 | 63 | 79 | 89 | 1.6 |
| 541662 | 17 | 13 | 45 | 62 | 84 | 3.1 |
| 541724 | 37 | 47 | 72 | 85 | 95 | 1.2 |

TABLE 190

| | 0.625 | 1.250 | 2.50 | 5.00 | 10.00 | IC₅₀ |
|---|---|---|---|---|---|---|
| ISIS No | μM | μM | μM | μM | μM | (μM) |
| 541748 | 86 | 94 | 96 | 98 | 98 | <0.6 |
| 541767 | 83 | 91 | 95 | 96 | 98 | <0.6 |
| 541797 | 78 | 89 | 93 | 97 | 99 | <0.6 |
| 541766 | 59 | 82 | 92 | 97 | 99 | <0.6 |
| 541742 | 65 | 87 | 93 | 95 | 99 | <0.6 |
| 541750 | 80 | 86 | 96 | 96 | 99 | <0.6 |
| 541262 | 79 | 88 | 93 | 97 | 97 | <0.6 |
| 541749 | 71 | 84 | 93 | 95 | 98 | <0.6 |
| 541793 | 71 | 88 | 94 | 97 | 98 | <0.6 |
| 541785 | 56 | 79 | 89 | 93 | 98 | <0.6 |
| 541746 | 34 | 61 | 85 | 94 | 97 | 0.9 |
| 541752 | 49 | 72 | 88 | 93 | 93 | <0.6 |
| 541826 | 86 | 94 | 95 | 99 | 98 | <0.6 |
| 541811 | 66 | 87 | 93 | 97 | 98 | <0.6 |

TABLE 191

| | 0.625 | 1.250 | 2.50 | 5.00 | 10.00 | IC₅₀ |
|---|---|---|---|---|---|---|
| ISIS No | μM | μM | μM | μM | μM | (μM) |
| 541822 | 83 | 88 | 95 | 96 | 96 | <0.6 |
| 541870 | 77 | 87 | 95 | 97 | 98 | <0.6 |
| 541262 | 85 | 93 | 96 | 97 | 98 | <0.6 |
| 541873 | 32 | 77 | 93 | 94 | 97 | 0.7 |
| 541819 | 60 | 91 | 97 | 97 | 99 | <0.6 |
| 541841 | 86 | 91 | 95 | 96 | 97 | <0.6 |
| 541825 | 78 | 88 | 95 | 98 | 98 | <0.6 |
| 541863 | 63 | 77 | 87 | 93 | 97 | <0.6 |
| 541827 | 42 | 80 | 87 | 94 | 97 | <0.6 |
| 541875 | 77 | 84 | 93 | 96 | 97 | <0.6 |
| 541835 | 56 | 73 | 90 | 95 | 98 | <0.6 |
| 541838 | 72 | 90 | 93 | 98 | 97 | <0.6 |
| 541833 | 52 | 69 | 83 | 92 | 97 | <0.6 |
| 541813 | 47 | 75 | 86 | 95 | 97 | <0.6 |

TABLE 192

| | 0.625 | 1.250 | 2.50 | 5.00 | 10.00 | IC₅₀ |
|---|---|---|---|---|---|---|
| ISIS No | μM | μM | μM | μM | μM | (μM) |
| 541853 | 74 | 79 | 88 | 93 | 91 | <0.6 |
| 541842 | 69 | 85 | 91 | 97 | 99 | <0.6 |
| 541877 | 79 | 91 | 93 | 98 | 97 | <0.6 |
| 541848 | 58 | 90 | 96 | 98 | 98 | 0.7 |
| 541804 | 23 | 81 | 89 | 95 | 95 | 0.8 |
| 541881 | 87 | 94 | 98 | 98 | 99 | <0.6 |
| 541936 | 91 | 96 | 98 | 99 | 98 | <0.6 |
| 541909 | 56 | 80 | 89 | 95 | 97 | <0.6 |
| 541907 | 75 | 91 | 95 | 97 | 98 | <0.6 |
| 541952 | 68 | 81 | 93 | 97 | 98 | <0.6 |
| 541953 | 68 | 80 | 94 | 97 | 98 | <0.6 |
| 541914 | 60 | 78 | 94 | 97 | 97 | <0.6 |
| 541880 | 56 | 74 | 89 | 94 | 95 | <0.6 |
| 541903 | 37 | 74 | 87 | 96 | 98 | 0.6 |

TABLE 193

| | 0.625 | 1.250 | 2.50 | 5.00 | 10.00 | IC₅₀ |
|---|---|---|---|---|---|---|
| ISIS No | μM | μM | μM | μM | μM | (μM) |
| 541895 | 47 | 72 | 85 | 93 | 94 | <0.6 |
| 541882 | 60 | 67 | 89 | 93 | 97 | <0.6 |
| 541889 | 63 | 80 | 87 | 94 | 97 | <0.6 |
| 541904 | 26 | 78 | 23 | 89 | 93 | 1.4 |
| 545418 | 0 | 81 | 91 | 94 | 95 | 1.7 |
| 541930 | 58 | 71 | 82 | 88 | 92 | <0.6 |
| 545439 | 67 | 87 | 93 | 96 | 98 | <0.6 |
| 542024 | 15 | 58 | 78 | 87 | 90 | 1.4 |
| 541985 | 59 | 81 | 88 | 93 | 97 | <0.6 |
| 541972 | 47 | 58 | 83 | 90 | 92 | 0.6 |
| 541991 | 57 | 64 | 88 | 92 | 83 | <0.6 |
| 541980 | 33 | 50 | 76 | 72 | 93 | 1.2 |

TABLE 194

| | 0.625 | 1.250 | 2.50 | 5.00 | 10.00 | IC₅₀ |
|---|---|---|---|---|---|---|
| ISIS No | μM | μM | μM | μM | μM | (μM) |
| 541264 | 26 | 44 | 64 | 79 | 89 | 1.6 |
| 541265 | 29 | 32 | 62 | 79 | 91 | 1.8 |
| 541263 | 25 | 40 | 62 | 78 | 93 | 1.7 |
| 541268 | 57 | 73 | 85 | 90 | 95 | 0.3 |
| 541266 | 15 | 33 | 46 | 66 | 90 | 2.5 |
| 542107 | 93 | 97 | 98 | 98 | 98 | <0.6 |
| 542052 | 93 | 96 | 97 | 96 | 98 | <0.6 |
| 542105 | 80 | 92 | 96 | 98 | 97 | <0.6 |
| 542102 | 94 | 96 | 96 | 97 | 98 | <0.6 |
| 542108 | 90 | 92 | 94 | 97 | 99 | <0.6 |
| 542080 | 87 | 93 | 95 | 95 | 97 | <0.6 |

TABLE 195

| | 0.625 | 1.250 | 2.50 | 5.00 | 10.00 | IC₅₀ |
|---|---|---|---|---|---|---|
| ISIS No | μM | μM | μM | μM | μM | (μM) |
| 542101 | 90 | 97 | 97 | 97 | 95 | <0.6 |
| 542051 | 89 | 96 | 95 | 98 | 97 | <0.6 |
| 542106 | 83 | 93 | 96 | 96 | 98 | <0.6 |
| 542071 | 84 | 91 | 94 | 97 | 97 | <0.6 |
| 542094 | 85 | 92 | 94 | 97 | 98 | <0.6 |
| 542069 | 89 | 94 | 97 | 95 | 98 | <0.6 |
| 542086 | 83 | 94 | 96 | 97 | 98 | <0.6 |
| 542085 | 85 | 92 | 96 | 97 | 97 | <0.6 |
| 542053 | 64 | 83 | 94 | 98 | 97 | <0.6 |
| 542087 | 69 | 84 | 99 | 95 | 98 | <0.6 |
| 542109 | 87 | 94 | 96 | 98 | 98 | <0.6 |
| 542126 | 96 | 98 | 99 | 98 | 98 | <0.6 |
| 542127 | 94 | 96 | 97 | 98 | 97 | <0.6 |
| 542128 | 90 | 96 | 98 | 98 | 97 | <0.6 |

TABLE 196

| | 0.625 | 1.250 | 2.50 | 5.00 | 10.00 | IC₅₀ |
|---|---|---|---|---|---|---|
| ISIS No | μM | μM | μM | μM | μM | (μM) |
| 542118 | 97 | 97 | 98 | 95 | 43 | <0.6 |
| 542186 | 93 | 96 | 98 | 99 | 98 | <0.6 |
| 542150 | 95 | 97 | 98 | 99 | 99 | <0.6 |
| 542122 | 90 | 94 | 98 | 98 | 99 | <0.6 |
| 542125 | 88 | 97 | 98 | 98 | 99 | <0.6 |
| 542145 | 90 | 96 | 98 | 99 | 99 | <0.6 |
| 542112 | 86 | 94 | 99 | 99 | 99 | <0.6 |
| 542149 | 88 | 93 | 99 | 98 | 99 | <0.6 |
| 542146 | 79 | 93 | 96 | 97 | 98 | <0.6 |
| 542153 | 87 | 94 | 97 | 98 | 99 | <0.6 |
| 542119 | 64 | 84 | 93 | 97 | 98 | <0.6 |
| 542137 | 76 | 91 | 97 | 97 | 98 | <0.6 |
| 542152 | 84 | 94 | 96 | 96 | 97 | <0.6 |
| 542157 | 83 | 95 | 98 | 99 | 98 | <0.6 |

TABLE 197

| | 0.625 | 1.250 | 2.50 | 5.00 | 10.00 | IC₅₀ |
|---|---|---|---|---|---|---|
| ISIS No | μM | μM | μM | μM | μM | (μM) |
| 542185 | 82 | 93 | 96 | 96 | 94 | <0.6 |
| 542143 | 81 | 91 | 96 | 98 | 98 | <0.6 |
| 542144 | 77 | 93 | 95 | 96 | 99 | <0.6 |
| 542139 | 87 | 93 | 98 | 98 | 98 | <0.6 |
| 542134 | 83 | 90 | 90 | 95 | 96 | <0.6 |
| 545333 | 68 | 85 | 91 | 96 | 98 | <0.6 |
| 545373 | 57 | 73 | 86 | 92 | 97 | <0.6 |
| 545438 | 84 | 96 | 98 | 97 | 99 | <0.6 |
| 545431 | 77 | 91 | 93 | 97 | 98 | <0.6 |
| 545447 | 70 | 85 | 96 | 96 | 97 | <0.6 |
| 545417 | 62 | 82 | 90 | 93 | 95 | <0.6 |
| 545467 | 77 | 88 | 91 | 94 | 95 | <0.6 |
| 545441 | 63 | 82 | 92 | 94 | 96 | <0.6 |

### Example 122: Dose-Dependent Antisense Inhibition of Human GHR in Hep3B Cells by Deoxy, MOE and (S)-cEt Gapmers

[1129] Gapmers from studies described above exhibiting significant in vitro inhibition of GHR mRNA were selected and tested at various doses in Hep3B cells. The antisense oligonucleotides were tested in a series of experiments that had similar culture conditions. The results for each experiment are presented in separate tables shown below. Cells were plated at a density of 20,000 cells per well and transfected using electroporation with 0.04 μM, 0.11 μM, 0.33 μM, 1.00 μM, and 3.00 μM concentrations of antisense oligonucleotide. After a treatment period of approximately 16 hours, RNA was isolated from the cells and GHR mRNA levels were measured by quantitative real-time PCR. Human primer probe set RTS3437_MGB was used to measure mRNA levels. GHR mRNA levels were adjusted according to total RNA content, as measured by RIBOGREEN®. Results are presented as percent inhibition of GHR, relative to untreated control cells.

[1130] The half maximal inhibitory concentration (IC₅₀) of each oligonucleotide is also presented. GHR mRNA levels were significantly reduced in a dose-dependent manner in antisense oligonucleotide treated cells.

TABLE 198

| | 0.04 | 0.11 | 0.33 | 1.00 | 3.00 | IC₅₀ |
|---|---|---|---|---|---|---|
| ISIS No | μM | μM | μM | μM | μM | (μM) |
| 539380 | 11 | 16 | 57 | 93 | 98 | 0.2 |
| 541724 | 0 | 27 | 71 | 66 | 83 | 0.3 |
| 541748 | 28 | 40 | 71 | 90 | 97 | 0.1 |
| 541767 | 19 | 38 | 54 | 87 | 98 | 0.2 |
| 541797 | 23 | 46 | 70 | 88 | 97 | 0.1 |
| 541766 | 15 | 26 | 49 | 82 | 96 | 0.3 |
| 541742 | 17 | 28 | 41 | 80 | 95 | 0.3 |
| 541750 | 33 | 27 | 60 | 89 | 98 | 0.2 |
| 541749 | 27 | 16 | 62 | 84 | 82 | 0.2 |
| 541793 | 0 | 14 | 44 | 77 | 96 | 0.4 |
| 541785 | 4 | 11 | 39 | 75 | 95 | 0.4 |
| 541752 | 14 | 6 | 45 | 70 | 94 | 0.4 |
| 541826 | 8 | 34 | 74 | 94 | 99 | 0.2 |
| 541811 | 6 | 4 | 45 | 79 | 97 | 0.4 |
| 541822 | 9 | 29 | 67 | 89 | 97 | 0.2 |

TABLE 199

| | 0.04 | 0.11 | 0.33 | 1.00 | 3.00 | IC₅₀ |
|---|---|---|---|---|---|---|
| ISIS No | μM | μM | μM | μM | μM | (μM) |
| 539380 | 0 | 16 | 47 | 82 | 98 | 0.4 |
| 541819 | 3 | 12 | 50 | 76 | 94 | 0.3 |
| 541841 | 0 | 19 | 47 | 80 | 95 | 0.3 |
| 541825 | 0 | 6 | 40 | 74 | 96 | 0.4 |
| 541827 | 5 | 26 | 48 | 76 | 95 | 0.3 |
| 541835 | 7 | 11 | 33 | 74 | 93 | 0.4 |
| 541838 | 21 | 26 | 61 | 90 | 97 | 0.2 |
| 541833 | 0 | 9 | 41 | 63 | 89 | 0.5 |
| 541813 | 0 | 17 | 28 | 65 | 92 | 0.5 |
| 541842 | 5 | 15 | 30 | 72 | 90 | 0.4 |
| 541804 | 0 | 12 | 3 | 49 | 79 | 1.1 |
| 542024 | 0 | 0 | 26 | 54 | 76 | 1.0 |
| 542107 | 15 | 45 | 78 | 92 | 99 | 0.1 |
| 542105 | 2 | 14 | 55 | 88 | 98 | 0.3 |
| 542102 | 10 | 16 | 73 | 88 | 98 | 0.2 |

TABLE 200

| | | | | | 3.00 | IC₅₀ |
|---|---|---|---|---|---|---|
| ISIS No | 0.04 μM | 0.11 μM | 0.33 μM | 1.00 μM | μM | (μM) |
| 539380 | 4 | 18 | 50 | 86 | 95 | 0.3 |
| 542108 | 15 | 13 | 65 | 86 | 97 | 0.2 |
| 542101 | 17 | 40 | 68 | 92 | 98 | 0.2 |
| 542106 | 4 | 23 | 56 | 88 | 98 | 0.3 |
| 542094 | 0 | 30 | 51 | 86 | 96 | 0.3 |
| 542086 | 13 | 38 | 50 | 84 | 97 | 0.2 |
| 542085 | 0 | 27 | 57 | 90 | 98 | 0.3 |
| 542087 | 7 | 3 | 49 | 80 | 92 | 0.4 |
| 542109 | 17 | 10 | 56 | 88 | 98 | 0.3 |
| 542126 | 40 | 63 | 91 | 96 | 99 | <0.03 |
| 542127 | 27 | 47 | 69 | 93 | 97 | 0.1 |
| 542128 | 11 | 30 | 66 | 90 | 98 | 0.2 |
| 542118 | 14 | 42 | 77 | 95 | 98 | 0.1 |
| 542150 | 31 | 46 | 72 | 94 | 98 | 0.1 |
| 542122 | 13 | 14 | 59 | 90 | 97 | 0.3 |

TABLE 201

| | | | | | 3.00 | IC₅₀ |
|---|---|---|---|---|---|---|
| ISIS No | 0.04 μM | 0.11 μM | 0.33 μM | 1.00 μM | μM | (μM) |
| 539380 | 0 | 2 | 50 | 86 | 97 | 0.4 |
| 542125 | 31 | 32 | 69 | 89 | 96 | 0.1 |
| 542145 | 15 | 29 | 64 | 91 | 97 | 0.2 |
| 542112 | 14 | 38 | 61 | 87 | 96 | 0.2 |
| 542149 | 9 | 37 | 63 | 90 | 97 | 0.2 |
| 542146 | 13 | 33 | 59 | 82 | 95 | 0.2 |
| 542153 | 22 | 26 | 63 | 86 | 96 | 0.2 |
| 542119 | 10 | 20 | 34 | 70 | 87 | 0.4 |
| 542137 | 3 | 19 | 47 | 77 | 95 | 0.3 |
| 542152 | 0 | 9 | 47 | 82 | 96 | 0.4 |
| 542157 | 0 | 26 | 56 | 84 | 96 | 0.3 |
| 542143 | 8 | 12 | 44 | 81 | 95 | 0.3 |
| 542144 | 0 | 21 | 42 | 75 | 95 | 0.4 |
| 542139 | 0 | 14 | 46 | 82 | 97 | 0.4 |
| 542134 | 3 | 23 | 43 | 72 | 92 | 0.4 |

TABLE 202

| | | | | | 3.00 | IC₅₀ |
|---|---|---|---|---|---|---|
| ISIS No | 0.04 μM | 0.11 μM | 0.33 μM | 1.00 μM | μM | (μM) |
| 539380 | 0 | 9 | 64 | 85 | 97 | 0.3 |
| 541870 | 7 | 15 | 48 | 80 | 92 | 0.3 |
| 541262 | 0 | 29 | 63 | 90 | 98 | 0.2 |
| 541863 | 0 | 26 | 40 | 82 | 93 | 0.4 |
| 541875 | 6 | 30 | 71 | 84 | 91 | 0.2 |
| 541853 | 0 | 13 | 39 | 67 | 91 | 0.5 |
| 541877 | 0 | 26 | 41 | 79 | 94 | 0.4 |
| 541881 | 0 | 30 | 54 | 87 | 94 | 0.3 |
| 541936 | 20 | 41 | 73 | 93 | 98 | 0.1 |
| 541909 | 0 | 16 | 34 | 64 | 90 | 0.5 |
| 541907 | 6 | 31 | 59 | 84 | 96 | 0.2 |
| 541952 | 0 | 0 | 50 | 72 | 92 | 0.5 |
| 541953 | 0 | 22 | 50 | 80 | 92 | 0.4 |
| 541914 | 0 | 0 | 46 | 76 | 93 | 0.4 |
| 541880 | 0 | 13 | 48 | 79 | 89 | 0.4 |

TABLE 203

| | | | | | 3.00 | IC₅₀ |
|---|---|---|---|---|---|---|
| ISIS No | 0.04 μM | 0.11 μM | 0.33 μM | 1.00 μM | μM | (μM) |
| 539380 | 0 | 5 | 53 | 78 | 94 | 0.4 |
| 541903 | 12 | 20 | 26 | 62 | 88 | 0.5 |
| 541895 | 3 | 12 | 29 | 66 | 92 | 0.5 |
| 541882 | 2 | 0 | 27 | 65 | 86 | 0.7 |
| 541889 | 12 | 12 | 47 | 68 | 87 | 0.4 |
| 541930 | 0 | 6 | 40 | 59 | 85 | 0.6 |
| 541985 | 0 | 16 | 41 | 66 | 93 | 0.4 |
| 542031 | 1 | 0 | 22 | 55 | 80 | 0.8 |
| 541972 | 0 | 1 | 23 | 46 | 83 | 0.9 |
| 541991 | 4 | 35 | 42 | 67 | 89 | 0.4 |
| 542052 | 5 | 28 | 70 | 92 | 98 | 0.2 |
| 542080 | 0 | 18 | 54 | 87 | 96 | 0.3 |
| 542051 | 0 | 18 | 52 | 86 | 97 | 0.3 |
| 542071 | 5 | 3 | 51 | 74 | 95 | 0.4 |
| 542069 | 0 | 7 | 56 | 85 | 94 | 0.3 |

TABLE 204

| | | | | | 3.00 | IC₅₀ |
|---|---|---|---|---|---|---|
| ISIS No | 0.04 μM | 0.11 μM | 0.33 μM | 1.00 μM | μM | (μM) |
| 539380 | 11 | 20 | 54 | 89 | 92 | 0.3 |
| 542053 | 6 | 14 | 38 | 69 | 74 | 0.6 |
| 542186 | 14 | 43 | 70 | 90 | 98 | 0.2 |
| 542185 | 0 | 26 | 48 | 80 | 96 | 0.3 |
| 545333 | 0 | 4 | 27 | 65 | 90 | 0.6 |
| 545336 | 0 | 15 | 24 | 43 | 79 | 0.9 |
| 545373 | 0 | 2 | 9 | 42 | 86 | 1.0 |
| 545438 | 0 | 24 | 56 | 81 | 92 | 0.3 |
| 545431 | 0 | 18 | 50 | 73 | 91 | 0.4 |
| 545447 | 0 | 15 | 34 | 78 | 93 | 0.4 |
| 545417 | 0 | 11 | 39 | 66 | 87 | 0.5 |
| 545467 | 12 | 16 | 37 | 76 | 93 | 0.4 |
| 545441 | 21 | 15 | 20 | 60 | 87 | 0.6 |
| 545439 | 17 | 24 | 49 | 82 | 91 | 0.3 |

### Example 123: Dose-Dependent Antisense Inhibition of Rhesus Monkey GHR in LLC-MK2 Cells

[1131] Gapmers from studies described above exhibiting significant in vitro inhibition of GHR mRNA were selected and tested for their potency for rhesus GHR mRNA in LLC-MK2 cells. Cells were plated at a density of 20,000 cells per well and transfected using electroporation with 0.12 μM, 0.37 μM, 1.11 μM, 3.33 μM, and 10.00 μM concentrations of antisense oligonucleotide. After a treatment period of approximately 16 hours, RNA was isolated from the cells and GHR mRNA levels were measured by quantitative real-time PCR. Primer probe set RTS3437_MGB was used to measure mRNA levels. GHR mRNA levels were adjusted according to total RNA content, as measured by RIBOGREEN®. Results are presented as percent inhibition of GHR, relative to untreated control cells.

[1132] The half maximal inhibitory concentration (IC₅₀) of each oligonucleotide is also presented. GHR mRNA levels were significantly reduced in a dose-dependent manner in antisense oligonucleotide treated cells.

TABLE 205

| ISIS | | 0.12 | 0.37 | 1.11 | 3.33 | 10.00 | IC₅₀ |
|---|---|---|---|---|---|---|---|
| No | Chemistry | μM | μM | μM | μM | μM | (μM) |
| 541262 | Deoxy, MOE and | 9 | 25 | 42 | 85 | 91 | 1.1 |
| | (S)-cEt | | | | | | |
| 541742 | Deoxy, MOE and | 0 | 24 | 19 | 58 | 77 | 3.2 |
| | (S)-cEt | | | | | | |
| 541767 | Deoxy, MOE and | 6 | 10 | 30 | 68 | 88 | 2.0 |
| | (S)-cEt | | | | | | |
| 541875 | Deoxy, MOE and | 7 | 19 | 64 | 84 | 96 | 0.9 |
| | (S)-cEt | | | | | | |
| 541881 | Deoxy, MOE and | 6 | 24 | 59 | 79 | 91 | 1.0 |
| | (S)-cEt | | | | | | |
| 542101 | Deoxy, MOE and | 0 | 5 | 38 | 71 | 81 | 2.0 |
| | (S)-cEt | | | | | | |
| 542112 | Deoxy, MOE and | 5 | 17 | 33 | 67 | 76 | 2.0 |
| | (S)-cEt | | | | | | |
| 542118 | Deoxy, MOE and | 1 | 6 | 35 | 68 | 86 | 2.0 |
| | (S)-cEt | | | | | | |
| 542125 | Deoxy, MOE and | 0 | 12 | 57 | 83 | 93 | 1.0 |
| | (S)-cEt | | | | | | |
| 542127 | Deoxy, MOE and | 1 | 0 | 30 | 68 | 84 | 2.4 |
| | (S)-cEt | | | | | | |
| 542128 | Deoxy, MOE and | 12 | 0 | 26 | 58 | 83 | 2.7 |
| | (S)-cEt | | | | | | |
| 542153 | Deoxy, MOE and | 4 | 0 | 0 | 36 | 59 | 6.6 |
| | (S)-cEt | | | | | | |
| 542185 | Deoxy, MOE and | 4 | 0 | 25 | 56 | 87 | 2.5 |
| | (S)-cEt | | | | | | |
| 542186 | Deoxy, MOE and | 15 | 23 | 51 | 73 | 90 | 1.1 |
| | (S)-cEt | | | | | | |
| 542051 | Deoxy, MOE and | 5 | 19 | 40 | 81 | 94 | 1.2 |
| | (S)-cEt | | | | | | |

TABLE 206

| | | | 0.37 | 1.11 | 3.33 | 10.00 | IC₅₀ |
|---|---|---|---|---|---|---|---|
| ISIS No | Chemistry | 0.12 μM | μM | μM | μM | μM | (μM) |
| 523723 | 5-10-5 MOE | 23 | 14 | 31 | 43 | 71 | 3.5 |
| 532254 | 5-10-5 MOE | 29 | 35 | 42 | 69 | 87 | 0.8 |
| 532401 | 5-10-5 MOE | 27 | 28 | 46 | 73 | 88 | 1.2 |
| 533932 | 5-10-5 MOE | 10 | 24 | 48 | 70 | 92 | 1.2 |
| 539376 | 3-10-4 MOE | 21 | 8 | 8 | 35 | 81 | 4.3 |
| 539399 | 3-10-4 MOE | 2 | 10 | 14 | 18 | 57 | 8.3 |
| 539404 | 3-10-4 MOE | 39 | 12 | 25 | 27 | 57 | 7.7 |
| 539416 | 3-10-4 MOE | 24 | 35 | 44 | 79 | 89 | 1.0 |
| 539432 | 3-10-4 MOE | 9 | 29 | 42 | 73 | 89 | 1.2 |
| 541262 | Deoxy, MOE | 0 | 43 | 63 | 88 | 94 | 0.8 |
| | and (S)-cEt | | | | | | |
| 541742 | Deoxy, MOE | 3 | 19 | 35 | 56 | 85 | 1.9 |
| | and (S)-cEt | | | | | | |
| 541767 | Deoxy, MOE | 3 | 24 | 39 | 64 | 86 | 1.6 |
| | and (S)-cEt | | | | | | |
| 545439 | Deoxy, MOE | 19 | 15 | 43 | 74 | 80 | 1.7 |
| | and (S)-cEt | | | | | | |
| 545447 | Deoxy, MOE | 25 | 34 | 58 | 80 | 90 | 0.6 |
| | and (S)-cEt | | | | | | |

### Example 124: Dose-Dependent Antisense Inhibition of GHR in Cynomolgus Primary Hepatocytes

[1133] Gapmers from studies described above exhibiting significant in vitro inhibition of GHR mRNA were selected and tested for their potency for GHR mRNA in cynomolgus monkey primary hepatocytes. Cells were plated at a density of 20,000 cells per well and transfected using electroporation with 0.12 μM, 0.37 μM, 1.11 μM, 3.33 μM, and 10.00 μM concentrations of antisense oligonucleotide. After a treatment period of approximately 16 hours, RNA was isolated from the cells and GHR mRNA levels were measured by quantitative real-time PCR. Primer probe set RTS3437_MGB was used to measure mRNA levels. GHR mRNA levels were adjusted according to total RNA content, as measured by RIBOGREEN®. Results are presented as percent inhibition of GHR, relative to untreated control cells.

[1134] The half maximal inhibitory concentration (IC₅₀) of each oligonucleotide is also presented. GHR mRNA levels were significantly reduced in a dose-dependent manner in antisense oligonucleotide treated cells.

TABLE 207

| | | | 0.37 | 1.11 | 3.33 | 10.00 | IC₅₀ |
|---|---|---|---|---|---|---|---|
| ISIS No | Chemistry | 0.12 μM | μM | μM | μM | μM | (μM) |
| 541262 | Deoxy, MOE | 40 | 52 | 75 | 92 | 98 | 0.3 |
| | and (S)-cEt | | | | | | |
| 541742 | Deoxy, MOE | 40 | 57 | 51 | 91 | 96 | 0.2 |
| | and (S)-cEt | | | | | | |
| 541767 | Deoxy, MOE | 36 | 59 | 60 | 78 | 91 | 0.4 |
| | and (S)-cEt | | | | | | |
| 541875 | Deoxy, MOE | 54 | 76 | 88 | 95 | 95 | <0.1 |
| | and (S)-cEt | | | | | | |
| 541881 | Deoxy, MOE | 53 | 75 | 85 | 98 | 98 | <0.1 |
| | and (S)-cEt | | | | | | |
| 542101 | Deoxy, MOE | 38 | 55 | 78 | 89 | 97 | 0.2 |
| | and (S)-cEt | | | | | | |
| 542112 | Deoxy, MOE | 28 | 50 | 74 | 89 | 96 | 0.4 |
| | and (S)-cEt | | | | | | |
| 542118 | Deoxy, MOE | 20 | 45 | 69 | 84 | 91 | 0.5 |
| | and (S)-cEt | | | | | | |
| 542125 | Deoxy, MOE | 33 | 62 | 77 | 92 | 97 | 0.3 |
| | and (S)-cEt | | | | | | |
| 542127 | Deoxy, MOE | 30 | 50 | 65 | 86 | 92 | 0.4 |
| | and (S)-cEt | | | | | | |
| 542128 | Deoxy, MOE | 25 | 40 | 52 | 80 | 93 | 0.7 |
| | and (S)-cEt | | | | | | |
| 542153 | Deoxy, MOE | 10 | 31 | 51 | 73 | 85 | 1.0 |
| | and (S)-cEt | | | | | | |
| 542185 | Deoxy, MOE | 12 | 45 | 65 | 85 | 93 | 0.6 |
| | and (S)-cEt | | | | | | |
| 542186 | Deoxy, MOE | 36 | 54 | 74 | 90 | 96 | 0.3 |
| | and (S)-cEt | | | | | | |
| 542051 | Deoxy, MOE | 9 | 29 | 32 | 32 | 42 | >10 |
| | and (S)-cEt | | | | | | |

TABLE 208

| | | | 0.37 | 1.11 | 3.33 | 10.00 | IC₅₀ |
|---|---|---|---|---|---|---|---|
| ISIS No | Chemistry | 0.12 μM | μM | μM | μM | μM | (μM) |
| 523435 | 5-10-5 | 35 | 47 | 61 | 74 | 85 | 0.5 |
| | MOE | | | | | | |
| 523723 | 5-10-5 | 4 | 16 | 40 | 66 | 86 | 1.8 |
| | MOE | | | | | | |
| 532254 | 5-10-5 | 14 | 15 | 24 | 16 | 9 | >10 |
| | MOE | | | | | | |
| 532401 | 5-10-5 | 37 | 54 | 73 | 88 | 94 | 0.3 |
| | MOE | | | | | | |
| 533932 | 5-10-5 | 23 | 40 | 69 | 78 | 86 | 0.6 |
| | MOE | | | | | | |
| 539376 | 3-10-4 | 3 | 0 | 44 | 65 | 91 | 2.0 |
| | MOE | | | | | | |
| 539399 | 3-10-4 | 0 | 0 | 9 | 42 | 67 | 5.0 |
| | MOE | | | | | | |
| 539404 | 3-10-4 | 0 | 0 | 26 | 52 | 71 | 3.5 |
| | MOE | | | | | | |
| 539416 | 3-10-4 | 8 | 29 | 62 | 89 | 93 | 0.7 |
| | MOE | | | | | | |
| 539432 | 3-10-4 | 0 | 24 | 55 | 85 | 93 | 0.9 |
| | MOE | | | | | | |
| 541262 | Deoxy, | 23 | 52 | 73 | 92 | 96 | 0.4 |
| | MOE and | | | | | | |
| | (S)-cEt | | | | | | |
| 541742 | Deoxy, | 15 | 51 | 73 | 86 | 97 | 0.5 |
| | MOE and | | | | | | |
| | (S)-cEt | | | | | | |
| 541767 | Deoxy, | 19 | 20 | 39 | 68 | 81 | 1.8 |
| | MOE and | | | | | | |
| | (S)-cEt | | | | | | |
| 545439 | Deoxy, | 0 | 0 | 30 | 61 | 90 | 2.4 |
| | MOE and | | | | | | |
| | (S)-cEt | | | | | | |
| 545447 | Deoxy, | 0 | 17 | 17 | 19 | 27 | >10 |
| | MOE and | | | | | | |
| | (S)-cEt | | | | | | |

### Example 125: Dose-Dependent Antisense Inhibition of GHR in Hep3B Cells

[1135] Gapmers from studies described above exhibiting significant in vitro inhibition of GHR mRNA were selected and tested for their potency for GHR mRNA at various doses in Hep3B cells. Cells were plated at a density of 20,000 cells per well and transfected using electroporation with 0.12 μM, 0.37 μM, 1.11 μM, 3.33 μM, and 10.00 μM concentrations of antisense oligonucleotide. After a treatment period of approximately 16 hours, RNA was isolated from the cells and GHR mRNA levels were measured by quantitative real-time PCR. Human primer probe set RTS3437_MGB was used to measure mRNA levels. GHR mRNA levels were adjusted according to total RNA content, as measured by RIBOGREEN®. Results are presented as percent inhibition of GHR, relative to untreated control cells.

[1136] The half maximal inhibitory concentration (IC₅₀) of each oligonucleotide is also presented. GHR mRNA levels were significantly reduced in a dose-dependent manner in antisense oligonucleotide treated cells.

TABLE 209

| | | | | | 10.00 | IC₅₀ |
|---|---|---|---|---|---|---|
| ISIS No | 0.12 μM | 0.37 μM | 1.11 μM | 3.33 μM | μM | (μM) |
| 541262 | 25 | 43 | 76 | 85 | 94 | 0.5 |
| 541742 | 32 | 55 | 76 | 88 | 97 | 0.3 |
| 541767 | 29 | 56 | 83 | 89 | 97 | 0.3 |
| 541875 | 38 | 68 | 84 | 93 | 94 | 0.1 |
| 541881 | 32 | 57 | 81 | 94 | 97 | 0.3 |
| 542051 | 34 | 66 | 83 | 95 | 98 | 0.2 |
| 542101 | 25 | 55 | 85 | 95 | 98 | 0.3 |
| 542112 | 18 | 56 | 83 | 95 | 98 | 0.4 |
| 542118 | 42 | 61 | 88 | 95 | 97 | 0.1 |
| 542125 | 30 | 63 | 87 | 95 | 98 | 0.2 |
| 542127 | 50 | 70 | 91 | 91 | 98 | 0.1 |
| 542128 | 38 | 63 | 88 | 96 | 98 | 0.2 |
| 542153 | 37 | 59 | 85 | 94 | 97 | 0.2 |
| 542185 | 44 | 51 | 76 | 89 | 96 | 0.2 |
| 542186 | 46 | 59 | 84 | 95 | 97 | 0.1 |

TABLE 210

| | | | | | 10.00 | IC₅₀ |
|---|---|---|---|---|---|---|
| ISIS No | 0.12 μM | 0.37 μM | 1.11 μM | 3.33 μM | μM | (μM) |
| 523435 | 9 | 26 | 49 | 78 | 93 | 1.0 |
| 523723 | 7 | 16 | 39 | 72 | 90 | 1.4 |
| 532254 | 36 | 46 | 69 | 86 | 94 | 0.4 |
| 532401 | 25 | 54 | 71 | 86 | 91 | 0.4 |
| 533932 | 8 | 47 | 69 | 80 | 94 | 0.7 |
| 539376 | 26 | 31 | 54 | 73 | 86 | 0.8 |
| 539399 | 23 | 43 | 72 | 89 | 94 | 0.5 |
| 539404 | 30 | 60 | 88 | 95 | 98 | 0.2 |
| 539416 | 30 | 59 | 84 | 93 | 98 | 0.3 |
| 539432 | 35 | 62 | 88 | 95 | 98 | 0.2 |
| 541262 | 43 | 60 | 84 | 89 | 98 | 0.2 |
| 541742 | 23 | 53 | 73 | 84 | 97 | 0.4 |
| 541767 | 22 | 49 | 74 | 85 | 92 | 0.4 |
| 545439 | 41 | 69 | 88 | 95 | 96 | 0.1 |
| 545447 | 31 | 47 | 63 | 74 | 82 | 0.5 |

### Example 126: Dose-Dependent Antisense Inhibition of GHR in Cynomolgus Primary Hepatocytes

[1137] Gapmers from studies described above exhibiting significant in vitro inhibition of GHR mRNA were selected and tested at various doses in cynomolgous monkey primary hepatocytes. Cells were plated at a density of 35,000 cells per well and transfected using electroporation with 0.04 μM, 0.12 μM, 0.37 μM, 1.11 μM, 3.33 μM, and 10.00 μM concentrations of antisense oligonucleotide. After a treatment period of approximately 16 hours, RNA was isolated from the cells and GHR mRNA levels were measured by quantitative real-time PCR. Primer probe set RTS3437_MGB was used to measure mRNA levels. GHR mRNA levels were adjusted according to total RNA content, as measured by RIBOGREEN®. Results are presented as percent inhibition of GHR, relative to untreated control cells.

[1138] The half maximal inhibitory concentration (IC₅₀) of each oligonucleotide is also presented. GHR mRNA levels were significantly reduced in a dose-dependent manner in antisense oligonucleotide treated cells.

TABLE 211

| | | | | 1.11 | 3.33 | 10.00 | IC₅₀ |
|---|---|---|---|---|---|---|---|
| ISIS No | 0.04 μM | 0.12 μM | 0.37 μM | μM | μM | μM | (μM) |
| 541767 | 8 | 17 | 29 | 48 | 59 | 58 | 0.4 |
| 541875 | 20 | 39 | 48 | 51 | 55 | 58 | 0.2 |
| 541881 | 23 | 36 | 49 | 60 | 56 | 58 | 0.1 |
| 542112 | 23 | 21 | 35 | 42 | 54 | 68 | 0.5 |
| 542118 | 19 | 14 | 26 | 38 | 54 | 59 | 0.8 |
| 542153 | 17 | 20 | 27 | 39 | 46 | 52 | 2.2 |
| 542185 | 20 | 23 | 27 | 46 | 39 | 56 | 2.0 |
| 532254 | 1 | 20 | 23 | 11 | 1 | 23 | >10 |
| 532401 | 0 | 15 | 24 | 39 | 47 | 55 | 1.6 |
| 523723 | 0 | 0 | 7 | 24 | 49 | 54 | 2.0 |

### Example 127: Comparative Analysis of Dose-Dependent Antisense Inhibition of GHR in Hep3B Cells

[1139] ISIS 532401 was compared with specific antisense oligonucleotides disclosed in US 2006/0178325 by testing at various doses in Hep3B cells. The oligonucleotides were selected based on the potency demonstrated in studies described in the application. Cells were plated at a density of 20,000 cells per well and transfected using electroporation with 0.11 μM, 0.33 μM, 1.00 μM, 1.11 μM, 3.00 μM, and 9.00 μM concentrations of antisense oligonucleotide. After a treatment period of approximately 16 hours, RNA was isolated from the cells and GHR mRNA levels were measured by quantitative real-time PCR. Human primer probe set RTS3437_MGB was used to measure mRNA levels. GHR mRNA levels were adjusted according to total RNA content, as measured by RIBOGREEN®. Results are presented as percent inhibition of GHR, relative to untreated control cells.

[1140] The half maximal inhibitory concentration (IC₅₀) of each oligonucleotide is also presented. The results indicate that ISIS 532401 was markedly more potent than the most potent oligonucleotides of US 2006/0178325.

TABLE 212

| | | | | | 9.00 | IC₅₀ |
|---|---|---|---|---|---|---|
| ISIS No | 0.11 μM | 0.33 μM | 1.00 μM | 3.00 μM | μM | (μM) |
| 227452 | 11 | 12 | 46 | 73 | 92 | 1.4 |
| 227488 | 26 | 25 | 39 | 76 | 88 | 1.2 |
| 272309 | 16 | 14 | 39 | 66 | 91 | 1.6 |
| 272322 | 13 | 20 | 44 | 70 | 86 | 1.4 |
| 272328 | 22 | 20 | 24 | 43 | 56 | 5.7 |
| 272338 | 22 | 24 | 52 | 71 | 85 | 1.1 |
| 532401 | 34 | 53 | 72 | 87 | 94 | 0.3 |

### Example 128: Tolerability of 5-10-5 MOE Gapmers Targeting Human GHR in CD1 Mice

[1141] CD1® mice (Charles River, Mass.) are a multipurpose mice model, frequently utilized for safety and efficacy testing. The mice were treated with ISIS antisense oligonucleotides selected from studies described above and evaluated for changes in the levels of various plasma chemistry markers.

### Treatment

[1142] Groups of eight- to ten-week old male CD1 mice were injected subcutaneously twice a week for 6 weeks with 50 mg/kg of ISIS oligonucleotides (100 mg/kg/week dose). One group of male CD1 mice was injected subcutaneously twice a week for 6 weeks with PBS. Mice were euthanized 48 hours after the last dose, and organs and plasma were harvested for further analysis.

### Plasma Chemistry Markers

[1143] To evaluate the effect of ISIS oligonucleotides on liver and kidney function, plasma levels of transaminases, bilirubin, creatinine, and BUN were measured using an automated clinical chemistry analyzer (Hitachi Olympus AU400e, Melville, N.Y.). The results are presented in Table 213. ISIS oligonucleotides that caused changes in the levels of any of the liver or kidney function markers outside the expected range for antisense oligonucleotides were excluded in further studies.

TABLE 213
Plasma chemistry markers in CD1 mice plasma at week 6

| | ALT | AST | Bilirubin | Creatinine | BUN |
|---|---|---|---|---|---|
| | (IU/L) | (IU/L) | (mg/dL) | (mg/dL) | (mg/dL) |
| PBS | 31 | 50 | 0.28 | 0.15 | 28 |
| ISIS 523271 | 366 | 285 | 0.18 | 0.11 | 29 |
| ISIS 523324 | 222 | 139 | 0.19 | 0.10 | 31 |
| ISIS 523604 | 2106 | 1157 | 0.41 | 0.06 | 48 |
| ISIS 532254 | 66 | 84 | 0.11 | 0.10 | 27 |
| ISIS 533121 | 176 | 155 | 0.19 | 0.09 | 27 |
| ISIS 533161 | 1094 | 904 | 0.23 | 0.07 | 29 |
| ISIS 533178 | 78 | 83 | 0.18 | 0.08 | 28 |
| ISIS 533234 | 164 | 147 | 0.21 | 0.09 | 26 |

### Hematology Assays

[1144] Blood obtained from all mice groups were sent to Antech Diagnostics for hematocrit (HCT) measurements and analysis, as well as measurements of the various blood cells, such as WBC, RBC, and platelets, and total hemoglobin content. The results are presented in Table 214. ISIS oligonucleotides that caused changes in the levels of any of the hematology markers outside the expected range for antisense oligonucleotides were excluded in further studies.

TABLE 214
Hematology markers in CD1 mice plasma at week 6

| | HCT | Hemoglobin | RBC | WBC | Platelets |
|---|---|---|---|---|---|
| | (%) | (g/dL) | (10⁶/μL) | (10³/μL) | (10³/μL) |
| PBS | 45 | 13 | 8.2 | 4.1 | 689 |
| ISIS 523271 | 42 | 12 | 7.9 | 4.5 | 1181 |
| ISIS 523324 | 39 | 11 | 7.5 | 7.9 | 980 |
| ISIS 523604 | 33 | 10 | 6.9 | 14.1 | 507 |
| ISIS 532254 | 35 | 10 | 6.9 | 7.2 | 861 |
| ISIS 533121 | 39 | 12 | 7.9 | 8.4 | 853 |
| ISIS 533161 | 49 | 14 | 9.3 | 9.0 | 607 |
| ISIS 533178 | 44 | 13 | 8.5 | 6.9 | 765 |
| ISIS 533234 | 42 | 12 | 7.8 | 9.2 | 1045 |

### Example 129: Tolerability of 5-10-5 MOE Gapmers Targeting Human GHR in CD1 Mice

[1145] CD1® mice were treated with ISIS antisense oligonucleotides selected from studies described above and evaluated for changes in the levels of various plasma chemistry markers.

### Treatment

[1146] Groups of eight- to ten-week old male CD1 mice were injected subcutaneously twice a week for 6 weeks with 50 mg/kg of ISIS oligonucleotide (100 mg/kg/week dose). One group of male CD1 mice was injected subcutaneously twice a week for 6 weeks with PBS. Mice were euthanized 48 hours after the last dose, and organs and plasma were harvested for further analysis.

### Plasma Chemistry Markers

[1147] To evaluate the effect of ISIS oligonucleotides on liver and kidney function, plasma levels of transaminases, bilirubin, creatinine, and BUN were measured using an automated clinical chemistry analyzer (Hitachi Olympus AU400e, Melville, N.Y.). The results are presented in Table 215. ISIS oligonucleotides that caused changes in the levels of any of the liver or kidney function markers outside the expected range for antisense oligonucleotides were excluded in further studies.

TABLE 215
Plasma chemistry markers in CD1 mice plasma at week 6

| | ALT | AST | Bilirubin | Creatinine | BUN |
|---|---|---|---|---|---|
| | (IU/L) | (IU/L) | (mg/dL) | (mg/dL) | (mg/dL) |
| PBS | 30 | 59 | 0.26 | 0.14 | 20 |
| ISIS 523715 | 636 | 505 | 0.24 | 0.14 | 22 |
| ISIS 523723 | 57 | 80 | 0.20 | 0.16 | 23 |
| ISIS 523726 | 165 | 167 | 0.18 | 0.15 | 23 |
| ISIS 523736 | 140 | 177 | 0.20 | 0.15 | 23 |
| ISIS 523747 | 96 | 108 | 0.17 | 0.14 | 23 |
| ISIS 523789 | 45 | 74 | 0.20 | 0.15 | 22 |
| ISIS 532395 | 64 | 111 | 0.23 | 0.12 | 21 |
| ISIS 532401 | 47 | 88 | 0.21 | 0.17 | 22 |
| ISIS 532411 | 225 | 426 | 0.17 | 0.16 | 22 |
| ISIS 532420 | 60 | 99 | 0.21 | 0.12 | 25 |
| ISIS 532468 | 319 | 273 | 0.15 | 0.14 | 21 |
| ISIS 533932 | 62 | 81 | 0.18 | 0.14 | 21 |

### Hematology Assays

[1148] Blood obtained from all mice groups were sent to Antech Diagnostics for hematocrit (HCT) measurements and analysis, as well as measurements of the various blood cells, such as WB), RBC, and platelets, and total hemoglobin content. The results are presented in Table 216. ISIS oligonucleotides that caused changes in the levels of any of the hematology markers outside the expected range for antisense oligonucleotides were excluded in further studies.

TABLE 216
Hematology markers in CD1 mice plasma at week 6

| | HCT | Hemoglobin | RBC | WBC | Platelets |
|---|---|---|---|---|---|
| | (%) | (g/dL) | (10⁶/μL) | (10³/μL) | (10³/μL) |
| PBS | 43 | 13 | 8.1 | 3.3 | 1047 |
| ISIS 523715 | 40 | 12 | 8.1 | 4.2 | 1153 |
| ISIS 523723 | 35 | 11 | 6.8 | 2.9 | 1154 |
| ISIS 523726 | 32 | 10 | 6.8 | 5.8 | 1056 |
| ISIS 523736 | 35 | 11 | 7.1 | 3.6 | 1019 |
| ISIS 523747 | 37 | 11 | 7.7 | 2.8 | 1146 |
| ISIS 523789 | 37 | 11 | 7.3 | 2.5 | 1033 |
| ISIS 532395 | 37 | 11 | 7.4 | 4.5 | 890 |
| ISIS 532401 | 36 | 11 | 7.1 | 3.7 | 1175 |
| ISIS 532411 | 27 | 8 | 5.3 | 3.2 | 641 |
| ISIS 532420 | 35 | 11 | 7.0 | 3.3 | 1101 |
| ISIS 532468 | 36 | 11 | 7.4 | 4.0 | 1043 |
| ISIS 533932 | 36 | 11 | 7.2 | 3.8 | 981 |

### Example 130: Tolerability of 3-10-4 MOE Gapmers Targeting Human GHR in CD1 Mice

[1149] CD1® mice were treated with ISIS antisense oligonucleotides selected from studies described above and evaluated for changes in the levels of various plasma chemistry markers.

### Treatment

[1150] Groups of eight- to ten-week old male CD1 mice were injected subcutaneously twice a week for 6 weeks with 50 mg/kg of ISIS oligonucleotide (100 mg/kg/week dose). One group of male CD1 mice was injected subcutaneously twice a week for 6 weeks with PBS. Mice were euthanized 48 hours after the last dose, and organs and plasma were harvested for further analysis.

### Plasma Chemistry Markers

[1151] To evaluate the effect of ISIS oligonucleotides on liver and kidney function, plasma levels of transaminases, bilirubin, creatinine, and BUN were measured using an automated clinical chemistry analyzer (Hitachi Olympus AU400e, Melville, N.Y.). The results are presented in Table 217. ISIS oligonucleotides that caused changes in the levels of any of the liver or kidney function markers outside the expected range for antisense oligonucleotides were excluded in further studies.

TABLE 217
Plasma chemistry markers in CD1 mice plasma at week 6

| | ALT | AST | Bilirubin | Creatinine | BUN |
|---|---|---|---|---|---|
| | (IU/L) | (IU/L) | (mg/dL) | (mg/dL) | (mg/dL) |
| PBS | 48 | 63 | 0.20 | 0.13 | 28 |
| ISIS 539302 | 204 | 192 | 0.15 | 0.15 | 24 |
| ISIS 539321 | 726 | 455 | 0.17 | 0.12 | 27 |
| ISIS 539360 | 3287 | 2495 | 0.58 | 0.13 | 22 |
| ISIS 539361 | 310 | 226 | 0.17 | 0.11 | 21 |
| ISIS 539376 | 77 | 75 | 0.14 | 0.12 | 27 |
| ISIS 539379 | 134 | 136 | 0.16 | 0.13 | 24 |
| ISIS 539380 | 180 | 188 | 0.14 | 0.12 | 23 |
| ISIS 539383 | 80 | 81 | 0.15 | 0.12 | 25 |
| ISIS 539399 | 119 | 127 | 0.13 | 0.12 | 24 |
| ISIS 539401 | 1435 | 1172 | 0.24 | 0.11 | 24 |
| ISIS 539403 | 1543 | 883 | 0.18 | 0.12 | 26 |
| ISIS 539404 | 75 | 109 | 0.16 | 0.13 | 23 |
| ISIS 539416 | 100 | 107 | 0.19 | 0.15 | 26 |
| ISIS 539432 | 55 | 64 | 0.20 | 0.14 | 22 |
| ISIS 539433 | 86 | 91 | 0.12 | 0.13 | 22 |

### Hematology Assays

[1152] Blood obtained from all mice groups were sent to Antech Diagnostics for hematocrit (HCT) measurements and analysis, as well as measurements of the various blood cells, such as WBC, RBC, and platelets, and total hemoglobin content. The results are presented in Table 218. ISIS oligonucleotides that caused changes in the levels of any of the hematology markers outside the expected range for antisense oligonucleotides were excluded in further studies.

TABLE 218
Hematology markers in CD1 mice plasma at week 6

| | HCT | Hemoglobin | RBC | WBC | Platelets |
|---|---|---|---|---|---|
| | (%) | (g/dL) | (10⁶/μL) | (10³/μL) | (10³/μL) |
| PBS | 46 | 13 | 8.5 | 6 | 954 |
| ISIS 539302 | 40 | 11 | 8.1 | 13 | 830 |
| ISIS 539321 | 39 | 11 | 7.8 | 16 | 723 |
| ISIS 539360 | 49 | 14 | 9.0 | 14 | 671 |
| ISIS 539361 | 45 | 13 | 8.5 | 9 | 893 |
| ISIS 539376 | 42 | 12 | 7.7 | 6 | 988 |
| ISIS 539379 | 42 | 12 | 8.1 | 7 | 795 |
| ISIS 539380 | 38 | 10 | 7.7 | 8 | 950 |
| ISIS 539383 | 45 | 12 | 8.4 | 8 | 795 |
| ISIS 539399 | 41 | 12 | 8.0 | 10 | 895 |
| ISIS 539401 | 41 | 11 | 8.2 | 9 | 897 |
| ISIS 539403 | 33 | 9 | 6.2 | 13 | 1104 |
| ISIS 539404 | 42 | 12 | 8.4 | 7 | 641 |
| ISIS 539416 | 41 | 11 | 7.5 | 5 | 686 |
| ISIS 539432 | 44 | 12 | 8.0 | 6 | 920 |
| ISIS 539433 | 40 | 11 | 7.4 | 6 | 987 |

### Example 131: Tolerability of Deoxy, MOE and (S)-cEt Gapmers Targeting Human GHR in CD1 Mice

[1153] CD1® mice were treated with ISIS antisense oligonucleotides selected from studies described above and evaluated for changes in the levels of various plasma chemistry markers.

### Treatment

[1154] Groups of eight- to ten-week old male CD1 mice were injected subcutaneously twice a week for 6 weeks with 25 mg/kg of ISIS oligonucleotide (50 mg/kg/week dose). One group of male CD1 mice was injected subcutaneously twice a week for 6 weeks with PBS. Mice were euthanized 48 hours after the last dose, and organs and plasma were harvested for further analysis.

### Plasma Chemistry Markers

[1155] To evaluate the effect of ISIS oligonucleotides on liver and kidney function, plasma levels of transaminases, bilirubin, creatinine, and BUN were measured using an automated clinical chemistry analyzer (Hitachi Olympus AU400e, Melville, N.Y.). The results are presented in Table 219. ISIS oligonucleotides that caused changes in the levels of any of the liver or kidney function markers outside the expected range for antisense oligonucleotides were excluded in further studies.

TABLE 219
Plasma chemistry markers in CD1 mice plasma at week 6

| | ALT | AST | Bilirubin | Creatinine | BUN |
|---|---|---|---|---|---|
| | (IU/L) | (IU/L) | (mg/dL) | (mg/dL) | (mg/dL) |
| PBS | 36 | 71 | 0.22 | 0.18 | 22 |
| ISIS 541262 | 115 | 133 | 0.21 | 0.18 | 21 |
| ISIS 541724 | 543 | 531 | 0.34 | 0.17 | 21 |
| ISIS 541742 | 44 | 71 | 0.18 | 0.16 | 21 |
| ISIS 541748 | 269 | 582 | 0.16 | 0.15 | 22 |
| ISIS 541749 | 626 | 491 | 0.20 | 0.20 | 22 |
| ISIS 541750 | 1531 | 670 | 0.20 | 0.18 | 23 |
| ISIS 541766 | 2107 | 1139 | 0.21 | 0.21 | 23 |
| ISIS 541767 | 42 | 62 | 0.21 | 0.17 | 20 |
| ISIS 541822 | 493 | 202 | 0.13 | 0.16 | 22 |
| ISIS 541826 | 889 | 398 | 0.21 | 0.14 | 17 |
| ISIS 541838 | 266 | 172 | 0.16 | 0.15 | 20 |
| ISIS 541870 | 445 | 272 | 0.23 | 0.16 | 23 |
| ISIS 541875 | 103 | 114 | 0.20 | 0.15 | 20 |
| ISIS 541907 | 940 | 725 | 0.16 | 0.19 | 35 |
| ISIS 541991 | 1690 | 1733 | 0.31 | 0.20 | 23 |

### Hematology Assays

[1156] Blood obtained from all mice groups were sent to Antech Diagnostics for hematocrit (HCT) measurements and analysis, as well as measurements of the various blood cells, such as WBC, RBC, and platelets, and total hemoglobin content. The results are presented in Table 220. ISIS oligonucleotides that caused changes in the levels of any of the hematology markers outside the expected range for antisense oligonucleotides were excluded in further studies.

TABLE 220
Hematology markers in CD1 mice plasma at week 6

| | HCT | Hemoglobin | RBC | WBC | Platelets |
|---|---|---|---|---|---|
| | (%) | (g/dL) | (10⁶/μL) | (10³/μL) | (10³/μL) |
| PBS | 37 | 11 | 7 | 3 | 1083 |
| ISIS 541262 | 38 | 11 | 7 | 6 | 1010 |
| ISIS 541724 | 52 | 16 | 10 | 9 | 940 |
| ISIS 541742 | 47 | 14 | 9 | 6 | 1134 |
| ISIS 541748 | 41 | 12 | 8 | 7 | 941 |
| ISIS 541749 | 41 | 12 | 8 | 5 | 1142 |
| ISIS 541750 | 42 | 12 | 8 | 4 | 1409 |
| ISIS 541766 | 39 | 11 | 7 | 7 | 989 |
| ISIS 541767 | 46 | 14 | 9 | 2 | 994 |
| ISIS 541822 | 42 | 12 | 8 | 3 | 1190 |
| ISIS 541826 | 41 | 12 | 8 | 10 | 1069 |
| ISIS 541838 | 44 | 13 | 8 | 6 | 1005 |
| ISIS 541870 | 38 | 11 | 7 | 8 | 1020 |
| ISIS 541875 | 44 | 13 | 8 | 6 | 1104 |
| ISIS 541907 | 40 | 11 | 8 | 9 | 1271 |
| ISIS 541991 | 34 | 10 | 6 | 6 | 1274 |

### Example 132: Tolerability of Deoxy, MOE and (S)-cEt Gapmers Targeting Human GHR in CD1 Mice

[1157] CD1® mice were treated with ISIS antisense oligonucleotides selected from studies described above and evaluated for changes in the levels of various plasma chemistry markers. The 3-10-4 MOE gapmer ISIS 539376 was also included in the study.

### Treatment

[1158] Groups of eight- to ten-week old male CD1 mice were injected subcutaneously twice a week for 6 weeks with 25 mg/kg of ISIS oligonucleotide (50 mg/kg/week dose). One group of male CD1 mice was injected subcutaneously twice a week for 6 weeks with PBS. Mice were euthanized 48 hours after the last dose, and organs and plasma were harvested for further analysis.

### Plasma Chemistry Markers

[1159] To evaluate the effect of ISIS oligonucleotides on liver and kidney function, plasma levels of transaminases, bilirubin, creatinine, and BUN were measured using an automated clinical chemistry analyzer (Hitachi Olympus AU400e, Melville, N.Y.). The results are presented in Table 221. ISIS oligonucleotides that caused changes in the levels of any of the liver or kidney function markers outside the expected range for antisense oligonucleotides were excluded in further studies.

TABLE 221
Plasma chemistry markers in CD1 mice plasma at week 6

| | ALT | AST | Bilirubin | Creatinine | BUN |
|---|---|---|---|---|---|
| | (IU/L) | (IU/L) | (mg/dL) | (mg/dL) | (mg/dL) |
| PBS | 43 | 66 | 0.21 | 0.11 | 20 |
| ISIS 541881 | 63 | 109 | 0.28 | 0.13 | 23 |
| ISIS 541936 | 3260 | 2108 | 0.40 | 0.13 | 24 |
| ISIS 542051 | 97 | 119 | 0.23 | 0.12 | 23 |
| ISIS 542052 | 454 | 236 | 0.23 | 0.12 | 25 |
| ISIS 542069 | 293 | 211 | 0.23 | 0.13 | 27 |
| ISIS 542085 | 91 | 87 | 0.18 | 0.10 | 21 |
| ISIS 542086 | 137 | 133 | 0.24 | 0.10 | 23 |
| ISIS 542094 | 86 | 143 | 0.23 | 0.13 | 21 |
| ISIS 542101 | 46 | 74 | 0.19 | 0.10 | 21 |
| ISIS 542102 | 4920 | 2432 | 2.30 | 0.15 | 29 |
| ISIS 542105 | 1255 | 575 | 0.35 | 0.13 | 21 |
| ISIS 542106 | 3082 | 2295 | 3.42 | 0.17 | 23 |
| ISIS 542107 | 4049 | 3092 | 0.50 | 0.14 | 20 |
| ISIS 542108 | 1835 | 859 | 0.32 | 0.11 | 21 |
| ISIS 539376 | 40 | 79 | 0.27 | 0.08 | 22 |

### Hematology Assays

[1160] Blood obtained from all mice groups were sent to Antech Diagnostics for hematocrit (HCT) measurements and analysis, as well as measurements of the various blood cells, such as WBC, RBC, and total hemoglobin content. The results are presented in Table 222. ISIS oligonucleotides that caused changes in the levels of any of the hematology markers outside the expected range for antisense oligonucleotides were excluded in further studies.

TABLE 222
Hematology markers in CD1 mice plasma at week 6

| | HCT | Hemoglobin | RBC | WBC |
|---|---|---|---|---|
| | (%) | (g/dL) | (10⁶/μL) | (10³/μL) |
| PBS | 46 | 13 | 8 | 6 |
| ISIS 541881 | 53 | 15 | 10 | 7 |
| ISIS 541936 | 41 | 11 | 8 | 18 |
| ISIS 542051 | 49 | 14 | 9 | 8 |
| ISIS 542052 | 46 | 13 | 9 | 9 |
| ISIS 542069 | 43 | 13 | 8 | 7 |
| ISIS 542085 | 38 | 11 | 7 | 5 |
| ISIS 542086 | 49 | 14 | 9 | 9 |
| ISIS 542094 | 36 | 10 | 6 | 5 |
| ISIS 542101 | 44 | 13 | 9 | 5 |
| ISIS 542102 | 27 | 7 | 5 | 25 |
| ISIS 542105 | 42 | 12 | 8 | 7 |
| ISIS 542106 | 37 | 10 | 7 | 14 |
| ISIS 542107 | 41 | 12 | 7 | 17 |
| ISIS 542108 | 51 | 14 | 8 | 10 |
| ISIS 539376 | 49 | 14 | 10 | 5 |

### Example 133: Tolerability of Deoxy, MOE and (S)-cEt Gapmers Targeting Human GHR in CD1 Mice

[1161] CD1® mice were treated with ISIS antisense oligonucleotides selected from studies described above and evaluated for changes in the levels of various plasma chemistry markers.

### Treatment

[1162] Groups of eight- to ten-week old male CD1 mice were injected subcutaneously twice a week for 6 weeks with 25 mg/kg of ISIS oligonucleotide (50 mg/kg/week dose). One group of male CD1 mice was injected subcutaneously twice a week for 6 weeks with PBS. Mice were euthanized 48 hours after the last dose, and organs and plasma were harvested for further analysis.

### Plasma Chemistry Markers

[1163] To evaluate the effect of ISIS oligonucleotides on liver and kidney function, plasma levels of transaminases, bilirubin, creatinine, and BUN were measured using an automated clinical chemistry analyzer (Hitachi Olympus AU400e, Melville, N.Y.). The results are presented in Table 223. ISIS oligonucleotides that caused changes in the levels of any of the liver or kidney function markers outside the expected range for antisense oligonucleotides were excluded in further studies.

TABLE 223
Plasma chemistry markers in CD1 mice plasma at week 6

| | ALT | AST | Bilirubin | Creatinine | BUN |
|---|---|---|---|---|---|
| | (IU/L) | (IU/L) | (mg/dL) | (mg/dL) | (mg/dL) |
| PBS | 51 | 63 | 0.3 | 0.14 | 27 |
| ISIS 542109 | 3695 | 2391 | 0.8 | 0.19 | 24 |
| ISIS 542112 | 119 | 104 | 0.3 | 0.16 | 28 |
| ISIS 542118 | 66 | 86 | 0.3 | 0.15 | 26 |
| ISIS 542122 | 1112 | 350 | 0.3 | 0.16 | 27 |
| ISIS 542125 | 79 | 92 | 0.2 | 0.13 | 26 |
| ISIS 542126 | 381 | 398 | 0.5 | 0.14 | 23 |
| ISIS 542127 | 54 | 85 | 0.3 | 0.16 | 26 |
| ISIS 542128 | 55 | 89 | 0.2 | 0.12 | 24 |
| ISIS 542145 | 834 | 671 | 0.3 | 0.11 | 24 |
| ISIS 542146 | 163 | 107 | 0.2 | 0.14 | 30 |
| ISIS 542149 | 974 | 752 | 0.3 | 0.12 | 26 |
| ISIS 542150 | 2840 | 2126 | 2.4 | 0.17 | 23 |
| ISIS 542153 | 53 | 75 | 0.2 | 0.14 | 28 |
| ISIS 542157 | 137 | 122 | 0.3 | 0.13 | 25 |
| ISIS 542185 | 57 | 72 | 0.2 | 0.11 | 23 |
| ISIS 542186 | 62 | 84 | 0.2 | 0.12 | 24 |
| ISIS 545431 | 2622 | 1375 | 3.0 | 0.15 | 28 |
| ISIS 545438 | 1710 | 1000 | 0.3 | 0.14 | 26 |
| ISIS 545439 | 70 | 117 | 0.2 | 0.12 | 28 |
| ISIS 545447 | 141 | 108 | 0.3 | 0.13 | 26 |

### Hematology Assays

[1164] Blood obtained from all mice groups were sent to Antech Diagnostics for hematocrit (HCT) measurements and analysis, as well as measurements of the various blood cells, such as WBC, RBC, and total hemoglobin content. The results are presented in Table 224. ISIS oligonucleotides that caused changes in the levels of any of the hematology markers outside the expected range for antisense oligonucleotides were excluded in further studies.

TABLE 224
Hematology markers in CD1 mice plasma at week 6

| | HCT | Hemoglobin | RBC | WBC | Platelets |
|---|---|---|---|---|---|
| | (%) | (g/dL) | (10⁶/μL) | (10³/μL) | (10³/μL) |
| PBS | 40 | 12 | 7 | 6 | 1210 |
| ISIS 542109 | 47 | 13 | 9 | 16 | 1244 |
| ISIS 542112 | 50 | 13 | 8 | 7 | 1065 |
| ISIS 542118 | 42 | 12 | 8 | 8 | 1120 |
| ISIS 542122 | 37 | 11 | 7 | 7 | 1064 |
| ISIS 542125 | 42 | 13 | 8 | 7 | 1063 |
| ISIS 542126 | 34 | 10 | 7 | 9 | 1477 |
| ISIS 542127 | 41 | 12 | 7 | 7 | 1144 |
| ISIS 542128 | 40 | 12 | 7 | 6 | 1196 |
| ISIS 542145 | 42 | 12 | 8 | 8 | 1305 |
| ISIS 542146 | 45 | 13 | 8 | 7 | 1310 |
| ISIS 542149 | 33 | 10 | 6 | 12 | 903 |
| ISIS 542150 | 27 | 7 | 5 | 18 | 1202 |
| ISIS 542153 | 46 | 13 | 8 | 5 | 1130 |
| ISIS 542157 | 44 | 12 | 9 | 6 | 791 |
| ISIS 542185 | 45 | 13 | 8 | 3 | 1031 |
| ISIS 542186 | 44 | 12 | 8 | 6 | 985 |
| ISIS 545431 | 28 | 7 | 6 | 13 | 2609 |
| ISIS 545438 | 40 | 11 | 8 | 8 | 1302 |
| ISIS 545439 | 48 | 13 | 9 | 4 | 857 |
| ISIS 545447 | 45 | 13 | 9 | 9 | 964 |

### Example 134: Tolerability of MOE Gapmers Targeting Human GHR in Sprague-Dawley Rats

[1165] Sprague-Dawley rats are a multipurpose model used for safety and efficacy evaluations. The rats were treated with ISIS antisense oligonucleotides from the studies described in the Examples above and evaluated for changes in the levels of various plasma chemistry markers.

### Treatment

[1166] Male Sprague-Dawley rats were maintained on a 12-hour light/dark cycle and fed ad libitum with Purina normal rat chow, diet 5001. Groups of 4 Sprague-Dawley rats each were injected subcutaneously twice a week for 6 weeks with 50 mg/kg of ISIS oligonucleotide (100 mg/kg weekly dose). Forty eight hours after the last dose, rats were euthanized and organs and plasma were harvested for further analysis.

### Liver Function

[1167] To evaluate the effect of ISIS oligonucleotides on hepatic function, plasma levels of transaminases were measured using an automated clinical chemistry analyzer (Hitachi Olympus AU400e, Melville, N.Y.). Plasma levels of ALT (alanine transaminase) and AST (aspartate transaminase) were measured and the results are presented in Table 225 expressed in IU/L. Plasma levels of bilirubin were also measured using the same clinical chemistry analyzer and the results are also presented in Table 225 expressed in mg/dL. ISIS oligonucleotides that caused changes in the levels of any markers of liver function outside the expected range for antisense oligonucleotides were excluded in further studies.

TABLE 225
Liver function markers in Sprague-Dawley rats

| | ALT | AST | Bilirubin |
|---|---|---|---|
| | (IU/L) | (IU/L) | (mg/dL) |
| PBS | 69 | 90 | 0.15 |
| ISIS 523723 | 79 | 123 | 0.12 |
| ISIS 523789 | 71 | 105 | 0.15 |
| ISIS 532254 | 67 | 97 | 0.14 |
| ISIS 532401 | 61 | 77 | 0.12 |
| ISIS 532420 | 102 | 127 | 0.17 |
| ISIS 533178 | 157 | 219 | 0.34 |
| ISIS 533234 | 71 | 90 | 0.11 |
| ISIS 533932 | 58 | 81 | 0.12 |
| ISIS 539376 | 75 | 101 | 0.14 |
| ISIS 539380 | 86 | 128 | 0.16 |
| ISIS 539383 | 64 | 94 | 0.14 |
| ISIS 539399 | 52 | 95 | 0.14 |
| ISIS 539404 | 88 | 118 | 0.13 |
| ISIS 539416 | 63 | 104 | 0.14 |
| ISIS 539432 | 63 | 90 | 0.13 |
| ISIS 539433 | 69 | 92 | 0.13 |

### Kidney Function

[1168] To evaluate the effect of ISIS oligonucleotides on kidney function, plasma levels of blood urea nitrogen (BUN) and creatinine were measured using an automated clinical chemistry analyzer (Hitachi Olympus AU400e, Melville, N.Y.). Results are presented in Table 226, expressed in mg/dL. ISIS oligonucleotides that caused changes in the levels of any of the kidney function markers outside the expected range for antisense oligonucleotides were excluded in further studies.

TABLE 226
Kidney function markers (mg/dL) in Sprague-Dawley rats

| | BUN | Creatinine |
|---|---|---|
| PBS | 24 | 0.32 |
| ISIS 523723 | 20 | 0.39 |
| ISIS 523789 | 19 | 0.37 |
| ISIS 532254 | 21 | 0.43 |
| ISIS 532401 | 17 | 0.36 |
| ISIS 532420 | 20 | 0.31 |
| ISIS 533178 | 20 | 0.43 |
| ISIS 533234 | 22 | 0.41 |
| ISIS 533932 | 19 | 0.43 |
| ISIS 539376 | 19 | 0.36 |
| ISIS 539380 | 18 | 0.35 |
| ISIS 539383 | 19 | 0.35 |
| ISIS 539399 | 18 | 0.39 |
| ISIS 539404 | 23 | 0.39 |
| ISIS 539416 | 17 | 0.39 |
| ISIS 539432 | 20 | 0.39 |
| ISIS 539433 | 20 | 0.34 |

### Hematology Assays

[1169] Blood obtained from all rat groups were sent to Antech Diagnostics for hematocrit (HCT) measurements and analysis, as well as measurements of the various blood cells, such as WBC, RBC, and total hemoglobin content. The results are presented in Table 227. ISIS oligonucleotides that caused changes in the levels of any of the hematology markers outside the expected range for antisense oligonucleotides were excluded in further studies.

TABLE 227
Hematology markers in Sprague-Dawley rats

| | HCT | Hemoglobin | RBC | WBC | Platelets |
|---|---|---|---|---|---|
| | (%) | (g/dL) | (10⁶/μL) | (10³/μL) | (10³/μL) |
| PBS | 46 | 15 | 8 | 11 | 1078 |
| ISIS 523723 | 38 | 12 | 7 | 19 | 626 |
| ISIS 523789 | 38 | 12 | 8 | 12 | 702 |
| ISIS 532254 | 36 | 12 | 7 | 11 | 547 |
| ISIS 532401 | 42 | 14 | 8 | 12 | 858 |
| ISIS 532420 | 37 | 12 | 7 | 17 | 542 |
| ISIS 533178 | 37 | 12 | 7 | 15 | 1117 |
| ISIS 533234 | 38 | 12 | 7 | 8 | 657 |
| ISIS 533932 | 40 | 13 | 7 | 9 | 999 |
| ISIS 539376 | 43 | 14 | 9 | 8 | 910 |
| ISIS 539380 | 33 | 11 | 5 | 6 | 330 |
| ISIS 539383 | 39 | 13 | 7 | 10 | 832 |
| ISIS 539399 | 37 | 11 | 7 | 4 | 603 |
| ISIS 539404 | 37 | 12 | 7 | 6 | 639 |
| ISIS 539416 | 33 | 11 | 6 | 9 | 601 |
| ISIS 539432 | 44 | 14 | 9 | 10 | 810 |
| ISIS 539433 | 38 | 12 | 7 | 9 | 742 |

### Organ Weights

[1170] Liver, heart, spleen and kidney weights were measured at the end of the study, and are presented in Table 228. ISIS oligonucleotides that caused any changes in organ weights outside the expected range for antisense oligonucleotides were excluded from further studies.

TABLE 228
Organ weights (g)

| | Heart | Liver | Spleen | Kidney |
|---|---|---|---|---|
| PBS | 0.35 | 3.6 | 0.2 | 0.8 |
| ISIS 523723 | 0.31 | 4.9 | 0.7 | 0.8 |
| ISIS 523789 | 0.34 | 4.8 | 0.6 | 0.8 |
| ISIS 532254 | 0.32 | 5.0 | 0.6 | 1.0 |
| ISIS 532401 | 0.32 | 3.8 | 0.4 | 0.8 |
| ISIS 532420 | 0.29 | 4.6 | 0.7 | 1.0 |
| ISIS 533178 | 0.34 | 5.2 | 0.7 | 0.9 |
| ISIS 533234 | 0.30 | 4.4 | 0.6 | 1.0 |
| ISIS 533932 | 0.31 | 3.9 | 0.5 | 0.9 |
| ISIS 539376 | 0.29 | 4.4 | 0.4 | 0.8 |
| ISIS 539380 | 0.31 | 6.3 | 1.6 | 1.2 |
| ISIS 539383 | 0.31 | 4.5 | 0.6 | 1.0 |
| ISIS 539399 | 0.31 | 4.5 | 0.8 | 1.0 |
| ISIS 539404 | 0.34 | 4.9 | 0.6 | 1.0 |
| ISIS 539416 | 0.32 | 4.7 | 0.7 | 0.9 |
| ISIS 539432 | 0.30 | 3.8 | 0.4 | 0.8 |
| ISIS 539433 | 0.28 | 4.1 | 0.7 | 1.0 |

### Example 135: Tolerability of Deoxy, MOE, and (S)-cEt Gapmers Targeting Human GHR in Sprague-Dawley Rats

[1171] Sprague-Dawley rats were treated with ISIS antisense oligonucleotides from the studies described in the Examples above and evaluated for changes in the levels of various plasma chemistry markers.

### Treatment

[1172] Male Sprague-Dawley rats were maintained on a 12-hour light/dark cycle and fed ad libitum with Purina normal rat chow, diet 5001. Groups of 4 Sprague-Dawley rats each were injected subcutaneously once a week for 6 weeks with 50 mg/kg of ISIS oligonucleotide (50 mg/kg weekly dose). Two groups of rats were injected subcutaneously once a week for 6 weeks with PBS. Forty eight hours after the last dose, rats were euthanized and organs and plasma were harvested for further analysis.

### Liver Function

[1173] To evaluate the effect of ISIS oligonucleotides on hepatic function, plasma levels of transaminases were measured using an automated clinical chemistry analyzer (Hitachi Olympus AU400e, Melville, N.Y.). Plasma levels of ALT and AST were measured and the results are presented in Table 229 expressed in IU/L. Plasma levels of bilirubin were also measured using the same clinical chemistry analyzer and the results are also presented in Table 229 expressed in mg/dL. ISIS oligonucleotides that caused changes in the levels of any markers of liver function outside the expected range for antisense oligonucleotides were excluded in further studies.

TABLE 229
Liver function markers in Sprague-Dawley rats

| | ALT | AST | Bilirubin |
|---|---|---|---|
| | (IU/L) | (IU/L) | (mg/dL) |
| PBS | 34 | 56 | 0.08 |
| PBS | 37 | 54 | 0.09 |
| ISIS 541881 | 53 | 77 | 0.12 |
| ISIS 542051 | 61 | 96 | 0.09 |
| ISIS 542101 | 64 | 214 | 0.10 |
| ISIS 542112 | 46 | 72 | 0.10 |
| ISIS 542118 | 42 | 60 | 0.08 |
| ISIS 542125 | 39 | 67 | 0.10 |
| ISIS 542127 | 56 | 75 | 0.12 |
| ISIS 542128 | 45 | 71 | 0.12 |
| ISIS 542153 | 44 | 69 | 0.11 |
| ISIS 542185 | 44 | 93 | 0.09 |
| ISIS 542186 | 51 | 107 | 0.12 |
| ISIS 545439 | 41 | 73 | 0.10 |
| ISIS 545447 | 103 | 114 | 0.10 |
| ISIS 541262 | 106 | 133 | 0.12 |
| ISIS 541742 | 56 | 102 | 0.11 |
| ISIS 541767 | 53 | 69 | 0.09 |
| ISIS 541875 | 70 | 133 | 0.08 |

### Kidney Function

[1174] To evaluate the effect of ISIS oligonucleotides on kidney function, plasma levels of blood urea nitrogen (BUN) and creatinine were measured using an automated clinical chemistry analyzer (Hitachi Olympus AU400e, Melville, N.Y.). Results are presented in Table 230, expressed in mg/dL. ISIS oligonucleotides that caused changes in the levels of any of the kidney function markers outside the expected range for antisense oligonucleotides were excluded in further studies.

TABLE 230
Kidney function markers (mg/dL) in Sprague-Dawley rats

| | BUN | Creatinine |
|---|---|---|
| PBS | 16 | 0.2 |
| PBS | 15 | 0.2 |
| ISIS 541881 | 22 | 0.3 |
| ISIS 542051 | 18 | 0.2 |
| ISIS 542101 | 22 | 0.3 |
| ISIS 542112 | 18 | 0.2 |
| ISIS 542118 | 18 | 0.3 |
| ISIS 542125 | 18 | 0.3 |
| ISIS 542127 | 19 | 0.3 |
| ISIS 542128 | 18 | 0.3 |
| ISIS 542153 | 17 | 0.3 |
| ISIS 542185 | 19 | 0.3 |
| ISIS 542186 | 19 | 0.3 |
| ISIS 545439 | 16 | 0.2 |
| ISIS 545447 | 16 | 0.2 |
| ISIS 541262 | 21 | 0.4 |
| ISIS 541742 | 19 | 0.2 |
| ISIS 541767 | 15 | 0.2 |
| ISIS 541875 | 16 | 0.2 |

### Hematology Assays

[1175] Blood obtained from all rat groups were sent to Antech Diagnostics for hematocrit (HCT) measurements and analysis, as well as measurements of the various blood cells, such as WBC, RBC, and total hemoglobin content. The results are presented in Table 231. ISIS oligonucleotides that caused changes in the levels of any of the hematology markers outside the expected range for antisense oligonucleotides were excluded in further studies.

TABLE 231
Hematology markers in Sprague-Dawley rats

| | HCT | Hemoglobin | RBC | WBC | Platelets |
|---|---|---|---|---|---|
| | (%) | (g/dL) | (10⁶/μL) | (10³/μL) | (10³/μL) |
| PBS | 43 | 14 | 7 | 7 | 775 |
| PBS | 49 | 15 | 8 | 8 | 1065 |
| ISIS 541881 | 41 | 13 | 8 | 6 | 553 |
| ISIS 542051 | 39 | 13 | 7 | 9 | 564 |
| ISIS 542101 | 37 | 12 | 7 | 15 | 603 |
| ISIS 542112 | 45 | 14 | 8 | 10 | 587 |
| ISIS 542118 | 47 | 15 | 8 | 7 | 817 |
| ISIS 542125 | 41 | 13 | 7 | 7 | 909 |
| ISIS 542127 | 44 | 14 | 8 | 10 | 872 |
| ISIS 542128 | 44 | 14 | 8 | 7 | 679 |
| ISIS 542153 | 48 | 15 | 8 | 7 | 519 |
| ISIS 542185 | 44 | 14 | 8 | 9 | 453 |
| ISIS 542186 | 44 | 14 | 8 | 12 | 433 |
| ISIS 545439 | 40 | 12 | 7 | 11 | 733 |
| ISIS 545447 | 43 | 13 | 8 | 9 | 843 |
| ISIS 541262 | 46 | 14 | 8 | 17 | 881 |
| ISIS 541742 | 47 | 15 | 8 | 10 | 813 |
| ISIS 541767 | 53 | 16 | 9 | 9 | 860 |
| ISIS 541875 | 42 | 13 | 7 | 9 | 840 |

### Organ Weights

[1176] Liver, heart, spleen and kidney weights were measured at the end of the study, and are presented in Table 232. ISIS oligonucleotides that caused any changes in organ weights outside the expected range for antisense oligonucleotides were excluded from further studies.

TABLE 232
Organ weights (g)

| | Heart | Liver | Spleen | Kidney |
|---|---|---|---|---|
| PBS | 0.4 | 3.7 | 0.2 | 0.9 |
| PBS | 0.3 | 3.2 | 0.2 | 0.7 |
| ISIS 541881 | 0.4 | 3.4 | 0.4 | 0.9 |
| ISIS 542051 | 0.4 | 3.8 | 0.4 | 1.0 |
| ISIS 542101 | 0.3 | 4.2 | 0.6 | 1.1 |
| ISIS 542112 | 0.3 | 3.7 | 0.4 | 0.8 |
| ISIS 542118 | 0.4 | 3.6 | 0.2 | 0.8 |
| ISIS 542125 | 0.4 | 3.7 | 0.3 | 1.1 |
| ISIS 542127 | 0.3 | 4.2 | 0.3 | 0.8 |
| ISIS 542128 | 0.3 | 3.5 | 0.3 | 0.8 |
| ISIS 542153 | 0.3 | 3.5 | 0.3 | 0.8 |
| ISIS 542185 | 0.4 | 3.8 | 0.4 | 0.9 |
| ISIS 542186 | 0.3 | 3.8 | 0.6 | 0.9 |
| ISIS 545439 | 0.4 | 4.1 | 0.3 | 0.9 |
| ISIS 545447 | 0.4 | 3.4 | 0.3 | 1.1 |
| ISIS 541262 | 0.3 | 3.4 | 0.3 | 2.0 |
| ISIS 541742 | 0.3 | 3.8 | 0.3 | 0.8 |
| ISIS 541767 | 0.3 | 3.4 | 0.2 | 0.8 |
| ISIS 541875 | 0.3 | 5.2 | 0.4 | 1.0 |

### Example 136: Effect of ISIS Antisense Oligonucleotides Targeting Human GHR in Cynomolgus Monkeys

[1177] Cynomolgus monkeys were treated with ISIS antisense oligonucleotides selected from studies described in the Examples above. Antisense oligonucleotide efficacy and tolerability, as well as their pharmacokinetic profile in the liver and kidney, were evaluated.

[1178] At the time this study was undertaken, the cynomolgus monkey genomic sequence was not available in the National Center for Biotechnology Information (NCBI) database; therefore, cross-reactivity with the cynomolgus monkey gene sequence could not be confirmed. Instead, the sequences of the ISIS antisense oligonucleotides used in the cynomolgus monkeys was compared to a rhesus monkey sequence for homology. It is expected that ISIS oligonucleotides with homology to the rhesus monkey sequence are fully cross-reactive with the cynomolgus monkey sequence as well. The human antisense oligonucleotides tested are cross-reactive with the rhesus genomic sequence (GENBANK Accession No. NW_001120958.1 truncated from nucleotides 4410000 to 4720000, designated herein as SEQ ID NO: 2332). The greater the complementarity between the human oligonucleotide and the rhesus monkey sequence, the more likely the human oligonucleotide can cross-react with the rhesus monkey sequence. The start and stop sites of each oligonucleotide to SEQ ID NO: 2332 is presented in Table 233. “Start site” indicates the 5′-most nucleotide to which the gapmer is targeted in the rhesus monkey gene sequence.

TABLE 233
Antisense oligonucleotides complementary to the rhesus
GHR genomic sequence (SEQ ID NO: 2332)

| | Target | Target | | |
|---|---|---|---|---|
| | Start | Stop | | SEQ ID |
| ISIS No | Site | Site | Chemistry | NO |
| 523723 | 149071 | 149090 | 5-10-5 MOE | 918 |
| 532254 | 64701 | 64720 | 5-10-5 MOE | 479 |
| 532401 | 147560 | 147579 | 5-10-5 MOE | 703 |
| 541767 | 152700 | 152715 | Deoxy, MOE | 1800 |
| | | | and (S)-cEt | |
| 541875 | 210099 | 210114 | Deoxy, MOE | 1904 |
| | | | and (S)-cEt | |
| 542112 | 146650 | 146665 | Deoxy, MOE | 2122 |
| | | | and (S)-cEt | |
| 542118 | 149074 | 149089 | Deoxy, MOE | 2127 |
| | | | and (S)-cEt | |
| 542185 | 245782 | 245797 | Deoxy, MOE | 2194 |
| | | | and (S)-cEt | |

### Treatment

[1179] Prior to the study, the monkeys were kept in quarantine during which the animals were observed daily for general health. The monkeys were 2-4 years old and weighed between 2 and 4 kg. Nine groups of 5 randomly assigned male cynomolgus monkeys each were injected subcutaneously with ISIS oligonucleotide or PBS using a stainless steel dosing needle and syringe of appropriate size into the intracapsular region and outer thigh of the monkeys. The monkeys were dosed three times (days 1, 4, and 7) for the first week, and then subsequently once a week for 12 weeks with 40 mg/kg of ISIS oligonucleotide. A control group of 5 cynomolgus monkeys was injected with PBS in a similar manner and served as the control group.

[1180] During the study period, the monkeys were observed twice daily for signs of illness or distress. Any animal experiencing more than momentary or slight pain or distress due to the treatment, injury or illness was treated by the veterinary staff with approved analgesics or agents to relieve the pain after consultation with the Study Director. Any animal in poor health or in a possible moribund condition was identified for further monitoring and possible euthanasia. Scheduled euthanasia of the animals was conducted on day 86 by exsanguination after ketamine/xylazine-induced anesthesia and administration of sodium pentobarbital. The protocols described in the Example were approved by the Institutional Animal Care and Use Committee (IACUC).

### Hepatic Target Reduction

### RNA Analysis

[1181] On day 86, RNA was extracted from liver, white adipose tissue (WAT) and kidney for real-time PCR analysis of measurement of mRNA expression of GHR. Results are presented as percent change of mRNA, relative to PBS control, normalized with RIBOGREEN®. ‘n.d.’ indicates that the data for that particular oligonucleotide was not measured. As shown in Table 234, treatment with ISIS antisense oligonucleotides resulted in significant reduction of GHR mRNA in comparison to the PBS control. Specifically, treatment with ISIS 532401 resulted in significant reduction of mRNA expression in all tissues.

TABLE 234
Percent inhibition of GHR mRNA in the cynomolgus
monkey liver relative to the PBS control

| ISIS No | Liver | Kidney | WAT |
|---|---|---|---|
| 532401 | 60 | 47 | 59 |
| 532254 | 63 | 65 | n.d. |
| 523723 | 38 | 0 | n.d. |
| 542112 | 61 | 60 | 36 |
| 542118 | 0 | 22 | 27 |
| 542185 | 66 | 53 | n.d. |
| 541767 | 0 | 14 | n.d. |
| 541875 | 34 | 77 | n.d. |

### Protein Analysis

[1182] Approximately 1 mL of blood was collected from all available animals at day 85 and placed in tubes containing the potassium salt of EDTA. The tubes were centrifuged (3000 rpm for 10 min at room temperature) to obtain plasma. Plasma levels of IGF-1 and GH were measured in the plasma. The results are presented in Table 235. The results indicate that treatment with ISIS oligonucleotides resulted in reduced IGF-1 protein levels.

TABLE 235
Plasma protein levels in the cynomolgus monkey

| | IGF-1 (% | GH |
|---|---|---|
| | baseline) | (ng/mL) |
| PBS | 121 | 19 |
| 532401 | 57 | 39 |
| 532254 | 51 | 26 |
| 523723 | 77 | 16 |
| 542112 | 46 | 48 |
| 542118 | 97 | 6 |
| 542185 | 59 | 32 |
| 541767 | 101 | 22 |
| 541875 | 45 | 47 |

### Tolerability Studies

### Body and Organ Weight Measurements

[1183] To evaluate the effect of ISIS oligonucleotides on the overall health of the animals, body and organ weights were measured. Body weights were measured on day 84 and are presented in Table 236. Organ weights were measured on day 86 and the data is also presented in Table 236. The results indicate that effect of treatment with antisense oligonucleotides on body and organ weights was within the expected range for antisense oligonucleotides. Specifically, treatment with ISIS 532401 was well tolerated in terms of the body and organ weights of the monkeys.

TABLE 236
Final body and organ weights in cynomolgus monkey

| | Body Wt | Spleen | Kidney | Liver |
|---|---|---|---|---|
| | (kg) | (g) | (g) | (g) |
| PBS | 2.7 | 2.8 | 12.3 | 56.7 |
| 532401 | 2.6 | 4.0 | 11.5 | 58.5 |
| 532254 | 2.6 | 4.8 | 15.4 | 69.5 |
| 523723 | 2.8 | 3.1 | 14.8 | 69.4 |
| 542112 | 2.6 | 3.5 | 13.6 | 60.0 |
| 542118 | 2.7 | 2.7 | 11.9 | 58.6 |
| 542185 | 2.6 | 5.5 | 17.2 | 68.5 |
| 541767 | 2.8 | 5.1 | 11.7 | 65.1 |
| 541875 | 2.8 | 5.5 | 13.2 | 55.0 |

### Liver Function

[1184] To evaluate the effect of ISIS oligonucleotides on hepatic function, blood samples were collected from all the study groups. The blood samples were collected via femoral venipuncture, 48 hrs post-dosing. The monkeys were fasted overnight prior to blood collection. Blood was collected in tubes containing K₂-EDTA anticoagulant, which were centrifuged to obtain plasma. Levels of various liver function markers were measured using a Toshiba 200FR NEO chemistry analyzer (Toshiba Co., Japan). Plasma levels of ALT and AST and bilirubin were measured. The results indicate that antisense oligonucleotides had no effect on liver function outside the expected range for antisense oligonucleotides. Specifically, treatment with ISIS 532401 was well tolerated in terms of the liver function in monkeys.

### Kidney Function

[1185] To evaluate the effect of ISIS oligonucleotides on kidney function, blood samples were collected from all the study groups. The blood samples were collected via femoral venipuncture, 48 hrs post-dosing. The monkeys were fasted overnight prior to blood collection. Blood was collected in tubes containing K₂-EDTA anticoagulant, which were centrifuged to obtain plasma. Levels of BUN and creatinine were measured using a Toshiba 200FR NEO chemistry analyzer (Toshiba Co., Japan).

[1186] The plasma chemistry data indicate that most of the ISIS oligonucleotides did not have any effect on the kidney function outside the expected range for antisense oligonucleotides. Specifically, treatment with ISIS 532401 was well tolerated in terms of the kidney function of the monkeys.

### Hematology

[1187] To evaluate any effect of ISIS oligonucleotides in cynomolgus monkeys on hematologic parameters, blood samples of approximately 1.3 mL of blood was collected from each of the available study animals in tubes containing K₂-EDTA. Samples were analyzed for red blood cell (RBC) count, white blood cells (WBC) count, individual white blood cell counts, such as that of monocytes, neutrophils, lymphocytes, as well as for platelet count, hemoglobin content and hematocrit, using an ADVIA120 hematology analyzer (Bayer, USA).

[1188] The data indicate the oligonucleotides did not cause any changes in hematologic parameters outside the expected range for antisense oligonucleotides at this dose. Specifically, treatment with ISIS 532401 was well tolerated in terms of the hematologic parameters of the monkeys.

### C-Reactive Protein Level Analysis

[1189] To evaluate any inflammatory effect of ISIS oligonucleotides in cynomolgus monkeys, blood samples were taken for analysis. The monkeys were fasted overnight prior to blood collection. Approximately 1.5 mL of blood was collected from each animal and put into tubes without anticoagulant for serum separation. The tubes were kept at room temperature for a minimum of 90 min and then centrifuged at 3,000 rpm for 10 min at room temperature to obtain serum. C-reactive protein (CRP), which is synthesized in the liver and which serves as a marker of inflammation, was measured using a Toshiba 200FR NEO chemistry analyzer (Toshiba Co., Japan). The results indicate that treatment with ISIS 532401 did not cause inflammation in monkeys.

### Example 137: Measurement of Viscosity of ISIS Antisense Oligonucleotides Targeting Human GHR

[1190] The viscosity of select antisense oligonucleotides from the study described in the Examples above was measured with the aim of screening out antisense oligonucleotides which have a viscosity more than 40 cP. Oligonucleotides having a viscosity greater than 40 cP would be too viscous to be administered to any subject.

[1191] ISIS oligonucleotides (32-35 mg) were weighed into a glass vial, 120 μL of water was added and the antisense oligonucleotide was dissolved into solution by heating the vial at 50° C. Part of (75 μL) the pre-heated sample was pipetted to a micro-viscometer (Cambridge). The temperature of the micro-viscometer was set to 25° C. and the viscosity of the sample was measured. Another part (20 μL) of the pre-heated sample was pipetted into 10 mL of water for UV reading at 260 nM at 85° C. (Cary UV instrument). The results are presented in Table 237 and indicate that all the antisense oligonucleotides solutions are optimal in their viscosity under the criterion stated above.

TABLE 237
Viscosity of ISIS antisense oligonucleotides targeting human GHR

| ISIS | | Viscosity |
|---|---|---|
| No. | Chemistry | (cP) |
| 523723 | 5-10-5 MOE | 8 |
| 532254 | 5-10-5 MOE | 22 |
| 532401 | 5-10-5 MOE | 12 |
| 541767 | Deoxy, MOE | 13 |
| | and (S)-cEt | |
| 541875 | Deoxy, MOE | 33 |
| | and (S)-cEt | |
| 542112 | Deoxy, MOE | 10 |
| | and (S)-cEt | |
| 542118 | Deoxy, MOE | 14 |
| | and (S)-cEt | |
| 542185 | Deoxy, MOE | 17 |
| | and (S)-cEt | |

### Example 138: Effect of ISIS Oligonucleotides Conjugated with GalNAc3-7 vs. Unconjugated in a Mouse Model

[1192] ISIS oligonucleotides targeting murine GHR and that were either unconjugated or conjugated with GalNAc3-7 were tested in BALB/c mice for efficacy and tolerability. BALB/c mice are a multipurpose mice model, frequently utilized for safety and efficacy testing.

[1193] The oligonucleotides are all 5-10-5 MOE gapmers, which are 20 nucleosides in length, wherein the central gap segment comprises of ten 2′-deoxynucleosides and is flanked by wing segments on the 5′ direction and the 3′ direction comprising five nucleosides each. Each nucleoside in the 5′ wing segment and each nucleoside in the 3′ wing segment has a 2′-MOE modification. The internucleoside linkages throughout each gapmer are phosphorothioate (P═S) linkages. All cytosine residues throughout each gapmer are 5-methylcytosines. “Start site” indicates the 5′-most nucleoside to which the gapmer is targeted in the murine gene sequence. “Stop site” indicates the 3′-most nucleoside to which the gapmer is targeted human gene sequence. Each gapmer listed in the Tables below is targeted to murine GHR mRNA, designated herein as SEQ ID NO: 2333 (GENBANK Accession No. NM_010284.2). The oligonucleotides are described in detail in the Table below.

TABLE 238
ISIS antisense oligonucleotides
targeting murine GHR and conjugated
with GalNAc3-7 or unconjugated

| | | | Target | SEQ |
|---|---|---|---|---|
| ISIS | | | Start | ID |
| No. | Sequence | Conjugated | Site | NO |
| 563179 | TGCCAACTCACTTGGATGTC | No | 772 | 2334 |
| 739949 | TGCCAACTCACTTGGATGTC | Yes | 772 | 2334 |
| 563223 | GAGACTTTTCCTTGTACACA | No | 3230 | 2335 |
| 706937 | GAGACTTTTCCTTGTACACA | Yes | 3230 | 2335 |

### Treatment

[1194] Two groups of seven-week old female BALB/c mice were injected subcutaneously for 4 weeks with 10 mg/kg/week, 25 mg/kg/week, or 50 mg/kg/week of ISIS 563223 or ISIS 563179. Two groups of seven-week old female BALB/c mice were injected subcutaneously for 4 weeks with 1 mg/kg/week, 5 mg/kg/week, or 10 mg/kg/week of ISIS 706937 or ISIS 739949. One group of female BALB/c mice was injected subcutaneously for 4 weeks with PBS. Mice were euthanized 48 hours after the last dose, and organs and plasma were harvested for further analysis.

### Target Reduction

[1195] To evaluate the efficacy of the ISIS oligonucleotides, plasma IGF-1 levels and mRNA expression levels of IGF-1 and GHR in liver, as well as mRNA expression levels of GHR in fat and kidney tissues, were measured. The results are presented in the Tables below.

[1196] The results indicate that the GalNAc3-7-conjugated oligonucleotides, ISIS 706937 and ISIS 739949, are 7-8 times more potent than the parent oligonucleotides with the same sequence, ISIS 563223 and ISIS 563179, in reducing GHR liver mRNA levels and were 6- to 8-fold more potent in reducing liver and plasma IGF-1 levels. Expression of GHR levels in the kidney and fat tissues were not decreased with GalNAc3-7-conjugated oligonucleotides, since the GalNAc3-7 conjugate group targeted the oligonucleotide specifically to the liver. This loss in fat and kidney reduction with GalNAc3-7-conjugated oligonucleotides did not affect reduction of IGF-1.

TABLE 239
Liver mRNA expression levels (% inhibition) at week 4

| | mg/kg/wk | GHR | ED₅₀ | IGF-1 | ED₅₀ |
|---|---|---|---|---|---|
| ISIS 563223 | 10 | 62 | 4.2 | 15 | 19.4 |
| | 25 | 97 | | 69 | |
| | 50 | 99 | | 77 | |
| ISIS 706937 | 1 | 59 | 0.6 | 24 | 3.4 |
| | 5 | 97 | | 63 | |
| | 10 | 98 | | 69 | |
| ISIS 563179 | 10 | 50 | 9.6 | 22 | 49.4 |
| | 25 | 67 | | 31 | |
| | 50 | 93 | | 50 | |
| ISIS 739949 | 1 | 39 | 1.2 | 18 | 6.4 |
| | 5 | 89 | | 57 | |
| | 10 | 94 | | 45 | |

TABLE 240
Plasma IGF-1 levels (% inhibition) at week 4

| | mg/kg/wk | Week 2 | Week 4 |
|---|---|---|---|
| PBS | — | 0 | 0 |
| ISIS 563223 | 10 | 13 | 22 |
| | 25 | 40 | 60 |
| | 50 | 43 | 71 |
| ISIS 706937 | 1 | 20 | 31 |
| | 5 | 46 | 64 |
| | 10 | 61 | 67 |
| ISIS 563179 | 10 | 19 | 25 |
| | 25 | 10 | 24 |
| | 50 | 25 | 46 |
| ISIS 739949 | 1 | 11 | 24 |
| | 5 | 29 | 41 |
| | 10 | 37 | 31 |

TABLE 241
GHR mRNA expression levels (% inhibition) in fat and kidney at week 4

| | mg/kg/wk | Fat | Kidney |
|---|---|---|---|
| ISIS 563223 | 10 | 21 | 45 |
| | 25 | 30 | 66 |
| | 50 | 62 | 65 |
| ISIS 706937 | 1 | 0 | 5 |
| | 5 | 0 | 0 |
| | 10 | 0 | 14 |
| ISIS 563179 | 10 | 4 | 38 |
| | 25 | 14 | 40 |
| | 50 | 20 | 41 |
| ISIS 739949 | 1 | 4 | 11 |
| | 5 | 0 | 1 |
| | 10 | 0 | 8 |

### Plasma Chemistry Markers

[1197] To evaluate the effect of ISIS oligonucleotides on liver and kidney function, plasma levels of transaminases, bilirubin, glucose, cholesterol, and triglycerides were measured using an automated clinical chemistry analyzer (Beckman Coulter AU480, Brea, Calif.). The results are presented in the Table below. None of the ISIS oligonucleotides caused changes in the levels of any of the liver or kidney function markers outside the expected range for antisense oligonucleotides. The GalNAc3-7-conjugated oligonucleotides had a slightly improved profile over the parent oligonucleotides.

TABLE 242
Plasma chemistry markers in BALB/c mice plasma at week 4

| | | ALT | AST | Bilirubin | Glucose | Cholesterol | Triglycerides |
|---|---|---|---|---|---|---|---|
| | mg/kg/wk | (IU/L) | (IU/L) | (mg/dL) | (mg/dL) | (mg/dL) | (mg/dL) |
| PBS | — | 26 | 58 | 0.2 | 165 | 70 | 123 |
| ISIS 563223 | 10 | 23 | 69 | 0.3 | 157 | 74 | 186 |
| | 25 | 39 | 91 | 0.3 | 165 | 62 | 160 |
| | 50 | 49 | 118 | 0.3 | 159 | 56 | 115 |
| ISIS 706937 | 1 | 25 | 62 | 0.2 | 152 | 64 | 167 |
| | 5 | 28 | 64 | 0.2 | 180 | 53 | 140 |
| | 10 | 27 | 65 | 0.2 | 165 | 56 | 133 |
| ISIS 563179 | 10 | 28 | 78 | 0.4 | 156 | 65 | 131 |
| | 25 | 28 | 95 | 0.2 | 152 | 59 | 118 |
| | 50 | 63 | 108 | 0.3 | 157 | 80 | 143 |
| ISIS 739949 | 1 | 24 | 66 | 0.2 | 156 | 66 | 114 |
| | 5 | 29 | 80 | 0.2 | 153 | 76 | 161 |
| | 10 | 31 | 59 | 0.3 | 174 | 78 | 155 |

[1198] The results taken together indicate that oligonucleotides targeting GHR mRNA expression when conjugated with GalNAc3-7 had tenfold greater potency and similar or improved tolerability profiles compared to the parent oligonucleotides.

### Example 139: Tolerability Study of an ISIS Oligonucleotide Conjugated with GalNAc3-7 and Targeting Human GHR in Mice

[1199] ISIS 766720 was designed with the same sequence as ISIS 532401, a potent and tolerable oligonucleotide targeting human GHR and described in the studies above. ISIS 766720 is a 5-10-5 MOE gapmer with mixed backbone chemistry and conjugated with GalNAc3-7. The chemical structure of ISIS 766720 without the GalNAc3-7 conjugate group is denoted as mCes mCes Aeo mCeo mCes Tds Tds Tds Gds Gds Gds Tds Gds Ads Ads Teo Aeo Ges mCes Ae (SEQ ID NO: 703) and is fully denoted as:

[chemical structure]

### Treatment

[1200] Groups of six-week old male CD-1 mice were injected subcutaneously for 6 weeks with 25 mg/kg/week, 50 mg/kg/week, or 100 mg/kg/week of ISIS 766720. One group of mice was injected subcutaneously for 6 weeks (days 1, 5, 15, 22, 29, 36, and 43) with PBS. Mice were euthanized 48 hours after the last dose, and organs and plasma were harvested for further analysis.

### Plasma Chemistry Markers

[1201] To evaluate the effect of ISIS 766720 on liver and kidney function, plasma levels of transaminases, bilirubin, creatinine and BUN were measured using an automated clinical chemistry analyzer (Hitachi Olympus AU400e, Melville, N.Y.). The results are presented in the Table below. ISIS 766720 did not cause changes in the levels of any of the liver or kidney function markers outside the expected range for antisense oligonucleotides and was deemed very tolerable.

TABLE 243
Plasma chemistry markers in CD-1 mice plasma at week 6

| | | ALT | AST | Bilirubin | Creatinine | BUN |
|---|---|---|---|---|---|---|
| | mg/kg/wk | (IU/L) | (IU/L) | (mg/dL) | (mg/dL) | (mg/dL) |
| PBS | — | 44 | 79 | 0.3 | 0.2 | 29 |
| ISIS | 25 | 29 | 47 | 0.2 | 0.2 | 34 |
| 766720 | 50 | 38 | 56 | 0.2 | 0.2 | 35 |
| | 100 | 29 | 45 | 0.2 | 0.2 | 31 |

### Body and Organ Weights

[1202] Body and organ weights were measured at the end of the study. The results are presented in the Table below. ISIS 766720 did not cause changes in weights outside the expected range for antisense oligonucleotides and was deemed very tolerable.

TABLE 244
Weights of CD-1 mice at week 6

| | | Body | Liver | Kidney | Spleen |
|---|---|---|---|---|---|
| | mg/kg/wk | (g) | (% body) | (% body) | (% body) |
| PBS | — | 40 | 3.0 | 1.0 | 0.2 |
| ISIS 766720 | 25 | 41 | 3.4 | 0.8 | 0.2 |
| | 50 | 41 | 3.3 | 0.8 | 0.2 |
| | 100 | 40 | 4.8 | 0.8 | 0.2 |

What is claimed:

1-5. (canceled)

6. A compound comprising a modified oligonucleotide and a conjugate group, wherein the modified oligonucleotide is 10 to 30 linked nucleosides in length and comprises a portion of at least 8 contiguous nucleobases 100% complementary to an equal portion of nucleobases 72107-72126, 153004-153019, 153921-153940, 155597-155612, 155594-155613, 159252-159267, 213425-213440, or 248233-2483632 of SEQ ID NO: 2.

7-19. (canceled)

20. The compound of claim 6, wherein the modified oligonucleotide comprises at least one modified internucleoside linkage, at least one modified sugar, or at least one modified nucleobase.

21. The compound of claim 20, wherein the modified internucleoside linkage is a phosphorothioate internucleoside linkage.

22. The compound of claim 20, wherein the modified oligonucleotide comprises at least 1 phosphodiester internucleoside linkage.

23-30. (canceled)

31. The compound of claim 20, wherein the modified sugar is a bicyclic sugar.

32. The compound of claim 31, wherein the bicyclic sugar is selected from the group consisting of: 4′-(CH₂)—O-2′ (LNA); 4′-(CH₂)₂—O-2′ (ENA); and 4′-CH(CH₃)—O-2′ (cEt).

33. The compound of claim 20, wherein the modified sugar is 2′-O-methoxyethyl.

34. The compound of claim 20, wherein the modified nucleobase is a 5-methylcytosine.

35-52. (canceled)

53. The compound of claim 6, wherein the conjugate group comprises:

[chemical structure]

54. The compound of claim 6, wherein the conjugate group comprises:

[chemical structure]

55. The compound of claim 6, wherein the conjugate group comprises:

[chemical structure]

56. (canceled)

57. (canceled)

58. The compound of claim 6, wherein the conjugate group comprises at least one phosphorus linking group or neutral linking group.

59-62. (canceled)

63. The compound of claim 6, wherein the conjugate group is covalently attached to the modified oligonucleotide.

64-130. (canceled)

131. The compound of claim 6, wherein the conjugate group comprises a cell-targeting moiety.

132. (canceled)

133. (canceled)

134. The compound of claim 131, wherein the cell targeting moiety comprises: [chemical structure]
wherein each n is, independently, from 1 to 20.

135. The compound of claim 131, wherein the cell targeting moiety comprises:

[chemical structure]

136. (canceled)

137. (canceled)

138. The compound of claim 131, wherein the cell targeting moiety comprises:

[chemical structure]

139-162. (canceled)

163. The compound of claim 6, wherein the conjugate group comprises a cleavable moiety selected from among: a phosphodiester, an amide, or an ester.

164. The compound of claim 6, wherein the conjugate group comprises a phosphodiester cleavable moiety.

165. The compound of claim 6, wherein the conjugate group does not comprise a cleavable moiety, and wherein the conjugate group comprises a phosphorothioate linkage between the conjugate group and the oligonucleotide.

166. The compound of claim 6, wherein the conjugate group comprises an amide cleavable moiety.

167. The compound of claim 6, wherein the conjugate group comprises an ester cleavable moiety.

168-190. (canceled)

191. A compound consisting of a conjugate group and a modified oligonucleotide according to the following formula: mCes mCes Aes mCes mCes Tds Tds Tds Gds Gds Gds Tds Gds Ads Ads Tes Aes Ges mCes Ae; wherein,
A=an adenine,
mC=a 5′-methylcytosine
G=a guanine,
T=a thymine,
e=a 2′-O-methoxyethyl modified nucleoside,
d=a 2′-deoxynucleoside, and
s=a phosphorothioate internucleoside linkage.

192. (canceled)

193. (canceled)

194. A compound consisting of a conjugate group and a modified oligonucleotide according to the following formula:

[chemical structure]

195. A composition comprising the compound of claim 6 or salt thereof and at least one of a pharmaceutically acceptable carrier or diluent.

196. A prodrug comprising the compound of claim 6.

197. A composition comprising the compound of claim 194 or salt thereof and at least one of a pharmaceutically acceptable carrier or diluent.

198. (canceled)

199. A method comprising administering to an animal the compound or composition of claim 195.

200. The method of claim 199, wherein the animal is a human.

201. A method of treating a disease associated with excess growth hormone in a human comprising administering to the human a therapeutically effective amount of the compound of claim 6, thereby treating the disease associated with excess growth hormone.

202. The method of claim 201, wherein the disease associated with excess growth hormone is acromegaly.

203. The method of claim 201, wherein the treatment reduces IGF-1 levels.

204-207. (canceled)

208. A method of reducing growth hormone receptor (GHR) levels in a human comprising administering to the human a therapeutically effective amount of the compound of claim 6, thereby reducing GHR levels in the human.

209. The method of claim 208, wherein the human has a disease associated with excess growth hormone.

210. The method of claim 208, wherein the disease associated with excess growth hormone is acromegaly.

211-214. (canceled)

The application's sequence listing, which the Patent Office published only in electronic form, follows.

SEQUENCE LISTING (2335 sequences)

SEQ ID NO: 1 - DNA, 4563 bp, homo sapien
cggcggcggcggcggcagcggcagcagcagctgctacagtggcggtggcggcggcggctgctgctgagcccgggcggcggcggggaccccgggctggggccacgcgggccggaggccccggcaccattggccccagcgcagacgcgaacccgcgctctctgatcagaggcgaagctcggaggtcctacaggtatggatctctggcagctgctgttgaccttggcactggcaggatcaagtgatgctttttctggaagtgaggccacagcagctatccttagcagagcaccctggagtctgcaaagtgttaatccaggcctaaagacaaattcttctaaggagcctaaattcaccaagtgccgttcacctgagcgagagactttttcatgccactggacagatgaggttcatcatggtacaaagaacctaggacccatacagctgttctataccagaaggaacactcaagaatggactcaagaatggaaagaatgccctgattatgtttctgctggggaaaacagctgttactttaattcatcgtttacctccatctggataccttattgtatcaagctaactagcaatggtggtacagtggatgaaaagtgtttctctgttgatgaaatagtgcaaccagatccacccattgccctcaactggactttactgaacgtcagtttaactgggattcatgcagatatccaagtgagatgggaagcaccacgcaatgcagatattcagaaaggatggatggttctggagtatgaacttcaatacaaagaagtaaatgaaactaaatggaaaatgatggaccctatattgacaacatcagttccagtgtactcattgaaagtggataaggaatatgaagtgcgtgtgagatccaaacaacgaaactctggaaattatggcgagttcagtgaggtgctctatgtaacacttcctcagatgagccaatttacatgtgaagaagatttctactttccatggctcttaattattatctttggaatatttgggctaacagtgatgctatttgtattcttattttctaaacagcaaaggattaaaatgctgattctgcccccagttccagttccaaagattaaaggaatcgatccagatctcctcaaggaaggaaaattagaggaggtgaacacaatcttagccattcatgatagctataaacccgaattccacagtgatgactcttgggttgaatttattgagctagatattgatgagccagatgaaaagactgaggaatcagacacagacagacttctaagcagtgaccatgagaaatcacatagtaacctaggggtgaaggatggcgactctggacgtaccagctgttgtgaacctgacattctggagactgatttcaatgccaatgacatacatgagggtacctcagaggttgctcagccacagaggttaaaaggggaagcagatctcttatgccttgaccagaagaatcaaaataactcaccttatcatgatgcttgccctgctactcagcagcccagtgttatccaagcagagaaaaacaaaccacaaccacttcctactgaaggagctgagtcaactcaccaagctgcccatattcagctaagcaatccaagttcactgtcaaacatcgacttttatgcccaggtgagcgacattacaccagcaggtagtgtggtcctttccccgggccaaaagaataaggcagggatgtcccaatgtgacatgcacccggaaatggtctcactctgccaagaaaacttccttatggacaatgcctacttctgtgaggcagatgccaaaaagtgcatccctgtggctcctcacatcaaggttgaatcacacatacagccaagcttaaaccaagaggacatttacatcaccacagaaagccttaccactgctgctgggaggcctgggacaggagaacatgttccaggttctgagatgcctgtcccagactatacctccattcatatagtacagtccccacagggcctcatactcaatgcgactgccttgcccttgcctgacaaagagtttctctcatcatgtggctatgtgagcacagaccaactgaacaaaatcatgccttagcctttctttggtttcccaagagctacgtatttaatagcaaagaattgactggggcaataacgtttaagccaaaacaatgtttaaaccttttttgggggagtgacaggatggggtatggattctaaaatgccttttcccaaaatgttgaaatatgatgttaaaaaaataagaagaatgcttaatcagatagatattcctattgtgcaatgtaaatattttaaagaattgtgtcagactgtttagtagcagtgattgtcttaatattgtgggtgttaatttttgatactaagcattgaatggctatgtttttaatgtatagtaaatcacgctttttgaaaaagcgaaaaaatcaggtggcttttgcggttcaggaaaattgaatgcaaaccatagcacaggctaattttttgttgtttcttaaataagaaacttttttatttaaaaaactaaaaactagaggtgagaaatttaaactataagcaagaaggcaaaaatagtttggatatgtaaaacatttattttgacataaagttgataaagattttttaataatttagacttcaagcatggctattttatattacactacacactgtgtactgcagttggtatgacccctctaaggagtgtagcaactacagtctaaagctggtttaatgttttggccaatgcacctaaagaaaaacaaactcgttttttacaaagcccttttatacctccccagactccttcaacaattctaaaatgattgtagtaatctgcattattggaatataattgttttatctgaatttttaaacaagtatttgttaatttagaaaactttaaagcgtttgcacagatcaacttaccaggcaccaaaagaagtaaaagcaaaaaagaaaacctttcttcaccaaatcttggttgatgccaaaaaaaaatacatgctaagagaagtagaaatcatagctggttcacactgaccaagatacttaagtgctgcaattgcacgcggagtgagttttttagtgcgtgcagatggtgagagataagatctatagcctctgcagcggaatctgttcacacccaacttggttttgctacataattatccaggaagggaataaggtacaagaagcattttgtaagttgaagcaaatcgaatgaaattaactgggtaatgaaacaaagagttcaagaaataagtttttgtttcacagcctataaccagacacatactcatttttcatgataatgaacagaacatagacagaagaaacaaggttttcagtccccacagataactgaaaattatttaaaccgctaaaagaaactttctttctcactaaatcttttataggatttatttaaaatagcaaaagaagaagtttcatcattttttacttcctctctgagtggactggcctcaaagcaagcattcagaagaaaaagaagcaacctcagtaatttagaaatcattttgcaatcccttaatatcctaaacatcattcatttttgttgttgttgttgttgttgagacagagtctcgctctgtcgccaggctagagtgcggtggcgcgatcttgactcactgcaatctccacctcccacaggttcaggcgattcccgtgcctcagcctcctgagtagctgggactacaggcacgcaccaccatgccaggctaatttttttgtattttagcagagacggggtttcaccatgttggccaggatggtctcgatctcctgacctcgtgatccacccgactcggcctcccaaagtgctgggattacaggtgtaagccaccgtgcccagccctaaacatcattcttgagagcattgggatatctcctgaaaaggtttatgaaaaagaagaatctcatctcagtgaagaatacttctcattttttaaaaaagcttaaaactttgaagttagctttaacttaaatagtatttcccatttatcgcagaccttttttaggaagcaagcttaatggctgataattttaaattctctctcttgcaggaaggactatgaaaagctagaattgagtgtttaaagttcaacatgttatttgtaatagatgtttgatagattttctgctactttgctgctatggttttctccaagagctacataatttagtttcatataaagtatcatcagtgtagaacctaattcaattcaaagctgtgtgtttggaagactatcttactatttcacaacagcctgacaacatttctatagccaaaaatagctaaatacctcaatcagtctcagaatgtcattttggtactttggtggccacataagccattattcactagtatgactagttgtgtctggcagtttatatttaactctctttatgtctgtggattttttccttcaaagtttaataaatttattttcttggattcctgatagtgtgcttctgttatcaaacaccaacataaaaatgatctaaacca

SEQ ID NO: 2 - DNA, 303000 bp, homo sapien
gccatctactgagatggaaatgtcacccactgtgattggagtatgtttaaggagaaagaaccagagttcagatgtggacatgtcaagtttcagaggtctgttagacatccaaatggagatacccagttgttagcctggagctctgtggagagatctgggttagagatataaatccaagagatacaacttttcattcaatttgattatttattggacgctttataaactctgtaaatactgggcactaacctagacattgcaggtacagatattaagaatatatagtttctccctcagaaatctcttaattaatgagaaaagcagacatgtcaacaaaactgcaatatttaataaaagaagatataaaggcctataaaggtgctgatacagggagaattaattaattccaccctggggaatagtcaggaagaccttcagagagaaagtaaacaattgattggaactttaagattaagaaggatttctctgggtggacaaagtaggatcttccaagcagagtggaaaccatgagcaaatgcagtttcattcttcagaaggtaaatgtgctctggcatgccttaacttataacaaattaatcaactcaatacctgctacattttccctcacaatttggaatatataaagaggcacatactactatggaccaatacctggtcatatatgagattgaaggacctttacttacgaggcttaaaaataaagactgcccttcatgtcagttgcaggtttatatctagttctatagtattaactgaggtgtcttttcctatgttttctgtgcatgatgactttttaaaaatcaaagacagagcagcagccagagtagtctagtttcatggcacacagaatggaggatattgctgaacccagatttaaaaaaaaaaagaagtcaattcttatttttttaagtatggccctgagctcatctcagagcataaacaatagaatttagaatatcttttatgactccgtctggcacctcctaaactagatcaagattctctagctcagggaagaagggcaaaggatgagaaggcacagagaggatataaacagagaggttggtagtgccaggctctgaagaaggtccaacttggaaggtcatttcagacaggcgtggagtcagcatttgaggcctgtctggtctctactcctgccaggactaccctgtcagccagcttggcaggtatggaccacccagcaggagtttttcttgactgtgccctaatcttttactttcccaagtttctctatatgggtacctccccttttaaaagctccagacacagccaagcaccactattgctccagcaaagtatgaagccccagaaatcaatggtttggggaagagtcttaggggaactaaatgcctccttatttttagatgccatagaacaagagcagttcaggatcaataaccatcccaccccatgataaaacacgccccttccagaatctttcctttttcgttcattctaggtgtctgtctggaacagctggggtatttgagccacagctgagcttctgaaagcattctaaggaacagtttttcacttatctgattcctttgaaaataggggtatcttatgtgatatctgctatcccagagtctttggtcctctgttccttctcaagtcttggctcccgtgtactacttcaaagccctatagatattttattctaaagaaaagaaacttggttcctttaagttgtttaaacatttctttctgggtataaacttgggtttgtgtctgggagctctgttaaaaaaaaaaagtctttagtaagccaaagctgttagaagcttataagtaagtgacattacaattgaccgtcagtaaatagtggaaagattgcatgactagctactccttcagatctgagacaacctggagctagatttttgtactctctactcagaaaagcatatagtgacttggggtttgatgctgtacaaaaatgacatgcttatgcacaactttaactttctgcaacacttttacaacttcttgtgaatgaagtaggcagggctcgcatttgacagatgagctatgtccagcgtgaggcagagttaaaacccttttcctggctcaggaacttcaggctggggcctgtgtctgctctccctgcatccctgtcctctagcagatacctctctgctaacatgctgagtgtccttggtaaattactcattctctctgtctccgtcttctaacctccacaataaagtccttcgtagttttaactatcttttcactgtgccccagtgagcaggagtttggaacttgattgttgatggaaaggcaatatttggatggctaaacacgctttccaaggtatctcgctgatcttcctctcattcctggagatagctaacctttttgtaagtgtttctttgagtctgtggactgcacttaacgctcttgtaggtcctgctttcatttggaacgggcaggcggagaggaaggaagtgtattgcaactaccaatattttcctctaggaggagccgcgcagctcagttgagagtgacacgcaccaactccagctcctcgccgggaagacttcatcccagcaactcggaatgcttggcccgggcggcactcggcctctccgcagcagttctcgaactggcctccttgaacgtccgcttcgccttcgcttctgcaacctggatctgggggactgcgggccaggcgcggcgtgacccctggtgaacggtggccgccttttcccacccctgccctcccatcctcccttcccgtttcaccccgccccctctctcctccccaagcctgacagcccgcgagctgccaagcagggcgcagccatgggaagaggaggagggctagggagcggcggcggcggcggcagcggcagcagcagctgctacagtggcggtggcggcggcggctgctgctgagcccgggcggcggcggggaccccgggctggggccacgcgggccggaggccccggcaccattggccccagcgcagacgcgaacccgcgctctctgatcagaggcgaagctcggaggtactggagtggggctccgggagtctggctttattttcctcctgttgtgccagggggcctgagggtgaaccctgggactctagttgtttatgaaaacgggaggatctgtcttatatatttacacggataattttttattccggatgacttggctgtgctcccctcctccttgcgaagaagttgttttctgctggtgggttgttgtaacccaatctagtgtgtgtgtgtgtgtgtgtgtgtgtgtgtgtgtgtgtgtgtgtgtgtctggaagttggtgagggcggcagggagttgcgggcgacagacgaaccatcacactctggcgtctgctctggcccgcgagtagtgtacgtggaggggtttactccggagacagttttgttaaagtcataaaagttttgctagtgtgtttctgtttgccatcatctgcctggctgcggcaggaactgccgaggctgctgctgttgcgcggggaagaatccccggcagcgcgactggagagactggggaggtcgagctgtgcgcgtggacacagcgcgcagagcgcgcggtcttttgcgcgtttgtgcgggccgcagccgcacgttggcaccgatggaactggggtcagtagagtgacagccaccagtccgcatgaactggggtaagtggaaattgtggcgagccgacctcccccagcttttgacacactagtggttgtaaaatcaaccaggcttaaagttttgacagaactgccagaggctgcgggtcaatggggtggccgcgtgtctagggagagggcgctggcggcgcagagggtgcggggcagggcacttgcgagtgcgtggggaagtctatttggggcgagtgctttatatatagcccgaggggatgcctgctgagaccgagctgcgggggctctcggtctggcgcggactgtgtgtcctgaatgagtgtacgtgtgcgctgtgtgtgcgcgcgcgagtgtgcgcctggggaggcgtgtcggcgcctgagccagtagggtgtgcagggtggaagaggccacagaggtgccgcctgtctgtttgtgccgccaggagaccttggaagggacagagaaaggtaacggaaggccaaagtgttgggaagtcagagtagtttctgcataggattaagtattaagggctttaaaataactaaacgcattgccctgagtggctgaggactggaagtgaggttttggggagttctcaggagaactgcatgggagggcgtttgggaggtctaagggatgtgtaatatgtgtgagtacagaacttcggagacagacacaggttggagctatgaatttgaaattttcagggtgctgctgtccacagtccagggactggctggtttcagaggtattcaggctccctggtgtgtgtgcctgggaagacactcatcttttcttgcagacatgggatattgtggcaggtcaggctctgtttcctgagcaactggtgttccaggctagtttccacctgaatcaccctagaagtgtcttttttctgatgataaatgttgaaacctttccagaaattaaaatgctggatagaaacaaaattgatgcagcagacaggattgttgattctatttattcagtgattgggagctctttttccttttgagaaaagcaaagctcagtgtttccagattagatttcaaggagtcttcagctatctacagcttcccttctgggcctttggatggagctggaaggatgtgttttggcctaaagacctttggaagacatcatgtgtagcttaaagaggttgtcccgtctctcatcatcttcttccacccttataaactttttgttttgcattaatctaaggaaagttggtgtgtcaacatttagcttttttttattggagtaaatatatcacagtgaaattatagttatggtctcctgaagcccatggaaagccaacacttaatgggcaaaggtgtgaaatgaaagtctataaatgcaatgacaaagtgacgagatgagtgcattcttttttcaaaatgaacataactgtgctcacaaaaatttgttttagccaggctttgggcccatgttttttattattagtttttaaacagcagactccacatcataaaccactttaaaatggatactagaggcctcctgtatgctatctctggcgcctgcttaaacagatgtttacagtgcttggtaacctatgggattgtcatgttgagtatcttgttagctcaggacataatgtttatagcataatataataaatggagccacagttgcagcgtgcttcttccaagtgcatgaagcaaatcttgcagcagggaaacaaatcttgcagttggtccaacttggctagccttctttggctatctcctggtgagcaatgttaatgtaaagataaatgtgagtgacgtagtgagaaagtgggacagtaaattgtttagcttagtgaaaaaagcatggattatgttttttaaatctgctaacctgaagattacacttctcaggtcgtaccactggcaaattgcacaactatgggaatttggtttgcttttaaagagcaatttttaaaaagtatgtcagtaatgaaaataacttatatttcttaatgtgtttatgtgtgtccatacaagccaatactttttcttctttaaaaagaaccctataatttctgtggtaattatttaaatattatgagcattcaaatctcctaatcaccttttcaatcttcaattgataagaatcgaagtttggtaagactggagtcatccctcagccaattgtgtaaacaagacagtacagaatgtctttctggcaagtaatttttttcaacctgaaacagataatataaataatatgtcccataaaagaattacttaagatgataattactttagaggtaattatctggtgcatgaacctctatctgtgaaaatggtctagtctatctcttattggaaataatcagttggaaatctccctttttcattggtcagtccattctaggaaagattcatttctagaaagttcttatactgaatcaacattttcttccatccacttgcctatccttcagcagctgaccacaatgaatctagtctcttttccctgtgtttaccatacttgaaaacaaatattatcctccttgccgaatccccttttgcctactcttggagcagtttttcatccactatagggttccaccctcctctgccttgaacaagatgcccttgattgtacattctcattgtattagtctgttctcatgctgctaataaagacatacgtgagactgtgtaatttataaagaaaaagaggtttaatggattcacagttccacatggctggggaggcctcacaatcatggcggaaggtgaaggaggagcaaaggcatgtcttacatgacagcaggcaagaaagcatgtgcaggggaactgccctttatagaaccatcagatctcattagacttattcactatcatgagaacaacatgggaaaaacccacttccatgatttaatcaactcctactgggtcccttccaccacatgtgggaattatgggaactacaattcaagatggcatttgggtggagacaaagccaaaccatatcattccgctcctagcccctcctaaatctcatgttctcacatttcaaaaccaatcataccttcccaacagtcccccaaagtcttaactcatttcagcattaactcaaaaatccacagtccaaagtctcacctgaaccaaggcaagtcccttccacctatgagcctgtaaaatcaaaagcaagttagttactttctagatacaatggaggtacaggcattgtgtaaatatgcccattccaaatgggagaaattggccaaaacagaggggctataggtgcaagtccaaagtctaatagggcagtcattaaaccttaaagttctgaaatgaactcctttgacttcatgtctcacatccaggctgttttcatggctggcattgactgtggcttttccaggcacatggtgctaactgtcagcccctaccattgggggtgctggggaatggtggccctcttctcttagctctactaggcagtgacccactggggactctgtgtagaggatccaaccccacatttcttttcctcattgccctagcaagggttgtttatgagggctctgcccctgcaggacaactctgcctggacatccaggcatttccatacatcctctgaaatctaggtggaagttcccaaacctcagttcttgtcttctgtgcacctgcaggaccaacaccacatggaagcttccaagacttggggctttcaccctttgcagccatggcctgagctgtaccttggccccttttagacatggctagaggggctgggacacagggtaccaagtacctaggctgcacctagcaggcccagaaaaccatttttccctcgtaggcctctgggcctgtgatgtgaggggctgccataaaggcctctgacatgttctggagacattttccctattgtcttggtgaccaacatttggcttctcattacttatgcaaatttctgcagcagtcttgaatttctccccagaaaatgggtttttcttttctatggcatcatcagcttgcacattttccaaacttttatgctcttttcacctcttgaatgctttgctgcttctaaatttcttctgccagataccctaaataatctctctcaagtttaaagttccacagatctctaggacaggggaaaaatgccaccagtctctttgctaaagcattaacaagagtcacctttgctccagttcccaacaagttcttcatcttcatctgagaccacatcagcctggactttattgtccatatcactataagcattttggtcaaagccattcaacaagtctctaggaagttccaaactttcccacatcttcctgttttctgagccctccaagtctctagaaagttccaaactttcccacattttcctgtcttcttttgagccctccatactgttcaaacctctgcctgttacccagttctaaagttgcttccacatttttgggtatctttacagcagcaccaactctaccattaccaacttactatattagcccattctcatgctgctaacaaagacatacccaagactgggtaatttataaagaaaattaggtttaatggtcgcacagttccacatggctgggaggcctctcaatcatggcagaaggtgaaggaggaataaggcactcttacatggtggcagacaataaggcatgtgcgggggaactaccctttataaaaccatcacatctcatgagacttaatcactatcgcaagaacagcatgggaaaaactcgccctcttggttcaatgacctcccactgggttcctcccatgacacatggggattatggtagctacaattcaagatgaaattggggtggggacacagcaaaaccatattactgactgtccctcctaatgtgtgttttctaaacaaaagatttataatttgtagttctgaacattctatatctattaagacagtttaatattaatgaaattctttagccatttcattacgctcttgattaatttcatacctataaacaagataacttgttcttttcagattattaatcatccatagtcaaagcatttttataatagcttcaaaacattttttcatgcctgaatgtactataaatttatggaaagtataatactgtgtgggtaaataaaattctataaacagtgcaaatagtgacttaatttctccctatcaaggaatatcaaccccaaatataccgaaagtagaatgttccaaagataaacaagttgaaactacatgttatagacaggtagggactatgatgtatttttttcataggcctcattgtgtctgcttccatgaacatgagtcagtactagcaatcaggcatttattgaaggcttgttctgccaaagtcccagagagtatgccatctggccttaaatgaagtgaaagtacatcaaataaagatacttccttgggcaactgggatttaagatgtgcatgcaggacatgtctaagtcagccatctactttttctcaggaggtaaatggcttgccaatgccacaggaaagtctaaagtgttcacactccataagcaggtcccatgtcctgttgtaggtctggacaggagctggacaaaggccctgttactcttagcttaccaagtcttagctgccttggaagaagatagcaaatctggcttatccagaggagaggcctgaagtgtgcattgggcacctacctggtgtgactgatttctcttttatgtatctgtcttgggcttccagctaaattgtgaattccccttgccaccaagctaagaatctgccacagcattgtcttcctgcacacacacacacatacacacacacaaaaacatatatgttggatgatgaagagacaatgtcagtttttcagcaagtctgaatgtgaaacaaatggctatgtttcttggtgcagtggggtgggaggatgagagagaaaaaacaaacctgtgatataaactgacatctgagcctaccaaaagccctttgagagacctttgatcaagacaaggggataatcatagtgttgtgcacttagataaaattgtccatgctagtcccgtgtgtgtgtgtgtgtgtgtgtgtgtgtgtatgtgtgtgtttcttcactttatccccagcattatggtctcaattcatacacatttgcttttttgctttattctagtctgatatgaagggaagaaataagcaatgattcagttcctttttttacatttcaaacattcatttcactactccccacctcccagtcctcaccccccaaaattacaagagacccattggcaagtacttggacatgcaattttcaaaccaaaggtttactttgctataagaaacgtctaagttaggatgatataatatgaaataatagtaaattagatgtcaagaaacttgggtcctctccaagctctgcctttaatgggctttgcagtttttgccaactatttaaccttcctgggcttcatatttcttgtatgttaaaaacaagcaaaaaggagaagtaaacaaaatgaccccttagaattctcttcagggctattgtttgaatccatttaattatcaaatttctctcttcttttaaatgtaagcatcaaaaaatgtttgcctattttattctctcatcattaatttttaatcaattaaataaaatagataaaaattttatcaaaaccatgcttcttgctttcattctaaaacaatgcaactcatcactatctgatgcagaaagtctttctgaaatattgtttttctcttttgttgttgtttttttctttgtgctaaagaaaattcattgatgagtaccaggttcttcaaagaaggatggaaaagtcattgttttttagtctcaacttctttcttcagtgcttcttcctaccttttaatataggcaaataaagccttaggccaggcactaattttacttagtaatgattcataagaaggtagtgattttgtcagaaattgctggctgcatgcttttaatcagcatctaaacttaccttcaaatactccattccaaaatcagcagataacttcttctacagagtctttcaaacttccagatgtgtttactgttttgattagggctttcttcttttgttgttgataagacttcagccagttttctttaggctaacattattatattcccaatgaattatacttcttaggttgtgaatttgtttaaagataaatctatctccagctggctggcttctaagtaaaaaggggtatcctagggaagaagtgcacttcacagggattcagtacaggtgtagagaattccctgatagagaattggaacacatcaagagtttgcaaattgaaaaggtacttttatgtacttatccatggtggacaacctgtgtcctagggaagaagcgcatttcacagggattcagcacaggtgtagagaattccctgatagggaactggaacacatcaagattttgcaatctgaacaggtacttttatgtacttatccatggttgacaacctactgtgctagacatttgctgtagtaactccttgattttttcctcggttgtttataaaattaaacatttgaagtagcctattgaaaagtcttaaaagaagcatctcctctattcctttagaatacagtatattaaacaagtgataaagtccaaagaaaaatccttattcttttcttgctttaaaaaatgcactttattttattaagcattatatctatcttttaaaactttgaattgccatatcaatgaaagtagagtgttatcattacaaaacagaatcgcagatagttctttccctgtgcttattgagagaaaaggtgcataattgatgctgtaaatgatcatcttgaatttgatgatggctggtgagaaacctcagtcagacattcaattttgattgccattggtcagaaaggcagcctttgttcttcgtcactatgtggcacatgatcctaattcaccctatcagctgcttctctgcacactttcaagctatgtgattgttatactagaaagcctctaagttggccaaactaatgaagactaatctgacaaagcatatgtgaatgataaattctgtaaagaccgtggagatagagcctctgcagtggcttcttcccctggggatagaagaagataccagaatccctgggcaagatgaaatagataaaggaaaggcatcatttttatacctaggaaatcagaaagattaaagaaagagaagcaagaataaagaagaactactactttcatagttcattctttcaatgtagcaccttatttcccatagagacattggtgaagccatgcttttctttgccatagaataggtgttcagtaaatattttgcaggtggccttaatatgtagtaaaacatacagaaatatggaagcattgacaagaagtttgtggataatttgagggcaaaaggatgtagataggatcaggttcataatgcaaatttgctattattctccttagattaatgatgtcactcaaacttcatgacctgctttccaaggtgtatgctgttcacagccttggaaacatttagaagtttttagtacttggagcaagatggatatatgtttcacattttatctaggacttagtaggacttgggagacatatctactttgccagatcttagtatacttattatggagcatgacattttaattctctttgcttttgtcctacaaagtttagtgttttaatttatttttctcggtgcatatagggagagaattatttatataatctgaaaagtactttgaaaactacttgggaaaatatgttgaataaataagtttttttttaaattagcctacaggatgtaagtctggccaggctagtggtatttttggtatcattgtgaaaaatcaaaaacagaacatgtatttatcaatccattagtgtgttcccaggaatgtgctagacactagggaattaaaacatgactcttgactttagtaccaagcattcaagctagaaggcaacactattaatgtacattcatggtgtgattatggaacagtcgatgactgtacaacttaatgaaaagttcattagagactataaatgctacatttatttagagagaaggacaatctgtttggactgagggattggaagagtggccttcatgggcaacatggctcctgagccagtacttaagatatggtattttttttttttttttttttttttggttaggtagaagggttggagaggtttcatgcaaggagttaggaactgaggaccaggaggcgtatcttgagttcactggggttactggtaatagggaggaggcagagagtaccaggctgtggatttgttatccgttggaagctcttcccattgcttattatggtcgctgcatataggctcatcccttgggtagggctattggagtggccaccctgaccctattgctgattggatagtggtggctgctgtgtggtatttcagcacatttatcttttctgaacattatgtaaattcagtctgaaaacttctttcttaaacaatgttccaagaggcctattaaagatgccaacaatatgacttccattcaagaatatgatcttgaatgggctttacaatggcagagctgacctgagattacctcctctgctcctgctctcaagccatgtgctgatgctgacagtcctggcccaatagagccatagggcctcacagaacttgagatcatctaccagtggctgtcaaccaagccactcctttctgctaggtagtgcatagggacattgggaaatacagttattataagaactggaaagagttgtaggcttttggtgcctgaagtcagaaatgctaaatttctgtgatgccaggggcagtcctatataagaaattattgtgcctcctcaaatgccagtagatccctattgaaatacttgagtctcatatcctcactttatttataggtgaggaaatgggaggccctgagaagtgacaaaactttcttctaggattaaacttcacagtctcagtgacagatttataactcaattcttttagttttctttcaagagctcttgttgcagcaccacagtccctcctattaacatgggctataactatggaatagcatgttgtttatctctgccatttttatagaaggatgatagttagctatgttaactatctgaatgggtggaatgtgaattgagataactggtacttgaccagcagttctttcgcctgggaacacacacagattcacctgtaaattagggttggcagatgcctgttgagatgtcaaccatagccaaagcttacaaattggttgactttttggaaagggcatggagtaggctttggattcacacaaatctgcttgtctgaccggatttgaatacaacccttcttatctttactatctttgtgactctcagccaattaaactctctgagctttatctgcaaaaaaacagttgattattcttatttcacaagcaatgagtcaaaatagtgcctggcacatattgggcactgcagatatagagaattccctacagtatctttttgagcataaagacttgaaaccttcacttataaaagaccctcttgataacagtcgctatttttttctcctcctttccccaaacaacgaaactagggcttcagtgagtccctgaagtgtttactttgtttgaactgttgagatttccctcctccagaagagtcctgctggccagagatgagttccttttgacttctctgtcaacgtgcctgtattattgtcacatagtaaaaatgaaagatatatctagatgattattagcaggttatgaaacttagattttaaagtcaataataaaagccattcctgggtagagaagtttttcagagagatttctaccttgccagcgatgagagagcctacttaggtgaggtgaatactttaggcaagttaagggataacacaatataatttatttaagtaagttttttatctgggactaatttcaggtttgcagaaaagttgcaaaaattttagaggtcctgtatattcctcacctagtttcccatgttgacatccataatcatgatatatttgtcaacactaagaaaccaatgttagtacagtactattaactaaaatccagacttcatcctaattcccccagagcttccactcacatcttcttttctgttccaggattcaatccagaagcgtgcactgcttttgattttatgatttttaaatactgtgcatgtgcttttttaatttgggccctctcatgtgttaaacttaccggcctttgtaaccagatagcaagttctgtaacagaaaatacaatgatgttgaatccaacatcatgctgggcacaaagtatgttctccaaactaattaaatttatcacagcaacaagaacaaagttttactcagcgtacatatgtagctgagtcctcattggtaagctaagaggtagtcataagagtgggataacttggaagaaatttgattttgaatgtgtgccctgaacattggtataaaacaggaccccctaaatcatatatgaactgagtctgtacactgtgcctagcattgtgtgtgcatatcacacttactcctgataactgtaaggcacatagccttgagtaacttagctgaggaaatgagaccaagggaagttaagttacttggccagggattcacagctagtaacacagctgagattaaaacatatgtttttctggcttcagagcctacactcctaatgctgtattcaattactcccacacttctccacttgcttaacccctattcttggtgtcctttttctaggtatacagaatttgaaaactatattgtcaaactacagcagacctggatgcatggtatacacttctttgtgagctggattaagtttcagccttgaatttgtggattattttcaaaacctgcctaacatctgtaaaacatgttgtttttttaatatgtagatatccacataaattgaccacaatgctcttcagaaagtcccataatccaataataaataaatttttgatacatggctaataacaggcacagaagcatctccaaaggacaggacattgatattgtgtaataatttaaagtattttatgattgtataatgtgcctgagttttggatagttgacctctatttctcagtctttacatagttactgcttttttaagtgttacatgagggatgtggaatattcagtgtaacatttgactaatctttatgttttgagtggcccaactgaaaattacccttggttgccttggaactctgggcatgatgttcaaaactagaaattcttgcaaattatttgagctttggctctgggaagataaacaacatgaataactaggttaaccagggctgaaatttctctaacctataattctaaattcagaaaagaatgggctttagggttttttgtttatttttgctttgattacaagttgttggaagcctagagttagtatctaataacacaatctatgtaaaacacaaattattggctcagaatgatatctaatttctaagaagatatgaggaggcaatcatgtaaaaacgtgcttttcttcctagaaggaataagctgggattggccaaaaggtaatccctttagagtctaatgtttagagcattgcatatttttaaagaagacatattaccttttagaacatatgtaggaaaccattttctttgcttatatggctacataaagttgtcatggttttaaaccgtgaccttagataccttatagaagtaattacaggcacaatctgtgaatgaagatttgcaaactatgcttcaccaagcctcagggactattggatgtccagaggacagagccatgttggatgtcttatgggccttcagtcctgcaaagtggtgtgctttcatgttttacacacagcagttctgagaaaatttaagttgaaaaaacagcctctcttcttattatttttatatttatttatttatttatttatttatttatttatttgaaacgaaatcttgctgtgtcaccaggctggagtgcagtggcgtgaacttggctcactgcaacctctgcctcccaggttcaagcgattctcttgcctctgcctcctgagtaggtgggactacaggtgcaggccaccacgcccagctaatttttgtatatatgtatttttaatagagacagggtttagccaggttgcccaggctgatcttgaactcctgagctcaagtgatcagcccacctcagcctctccaagtgctgggattacaggtgtgaggcaccgtgccgagccatcctgtcttctgaaaaaaaaaaaaaagcaaacaaaaatgtttaagcctggtatatattttcttatattgcataagctacttttctgactgcctctctttagaaattcctctgatttctagagaaaaaaaaatcgcattagctttttggtttctaaattcaggctcactttagtaactgctagattataaactcttagaaggcaaagggctatgtattctctacttgtggacactcaattagtttgcttaagcaattacttctgtgtaagcaacattaatgaagtgcttactatgatcaagggctataccaagtccttttttatattatttaatcccacacaaaacccatgatcgacctaattgtacacttggtgaaactatgatgtagggaggttaaataatttgttcaagaacccacagctggtaagtcgcacagtgtattcaaacccagatcttcctaattgcaaatgtgtccaactcccatgcttctaaccactgcctatgtgatggttctttgaaattcctccctccaagaagtggaatttaattccccccgtccattgaatgtgggccaaactcaggtgactcatttctattaaatggagtaaagtggaagtgaagatgtgtggctttagcgactaggtcattcaaagtggctcctgtcttggttgttctgtctcttatacctattgggcatttaatctggggaaaaccagctgccatgttttgagctgctctgtggaaaggctaacatgaaaagatactgtggatcctacagacagcttcaaatgaggacctgaggccctcagaccagtagccagtatgaaactgaagcctcttgaccacagcctccatgagagtaatggaatcttgaccccctagtgaaccacagcctccatgagagtaaaattcaagatggagccttgacacccagtggagcctcgagatgactgcagtcttccaccaacagcttgattcatgaaagaccatcagccagagccacccagctaaggtgattctaggcccctactcctagaaaataaatatttgctgttttgactgccaagtgtttgattaatttgttacgcagcaatagataaataatgcagcctaacactgtcctggtcatttttaaaaaagaaattgttttaattttactaaatcacaaattttaaaacattgatacagcaaggagaaactttccagaaaaaaaatgctgccaaatttaagtagtaaaatattaatgtccaaaaaacatcatagttacaatgacatctctaggattgaggattttgtaagtcaaaggtcagctgcttaaaaaacccataattttaaaaggaaggatattaataataactgcattattgaacatagatagcattttgaacttttaagaaatcctcatgggaaaactcaggaaataatctgtttggtaagttatcactcataatcttaaattgttaggtgcatgtttgcactttccatgatttgaagaggaatataaagcaaagttgaattttaacctcttccctaatgattttactcagcttttcaaaggggtcctaaaagctcagaggtcaagtcatttcttggtttgctctacctgacaaattgcattaactctgctttatagccacttgcagtttaataaatgacttggactttgattaatatctttagtgcttaagcccaagaatttgtataagactttgggatatagtactgtaaatttatctaaagatggacactggaaggtagaaggagatatattagtgttggtttgggtacatgtctaggtactgaatttggatcatcataagtccttacagaagatacttgttgacttgtcttttaaaaaatatgtgaaagtgattttttaatatatttacaaagtgatctaagtgatttaaggaattcattcatgaagtggatatgactagttcttgtttagtattcagaatgactgtaaaatagaaatgctgattttccttgcccagattgtagaacacagatcaaaccctcctagtccttcccttaaatgttttttctccatacagcttatgccctgagttctcaaaacattttttatattgaactggactgtatagtatatgcctgaccctgattcatgggattatgctgcaagggaatataaagatgaatattgatagcctgagtgtgaaaattcatcattactctcatcctcattcattaattcatttgttcattaactcataaacacactaattgattcaacagatatttattgaacgtttacactttgcccagtggagcactggactaggtgctagcatagtataataagcaacccagaaatagcctctgccttgctgcatttcatagtctaggacggagaaaggcattaaccaagtataatttaaaattgttttaagtaatgtgaaataaacatatatgagaacttgactcaggttggtatatttgatggttagggaaagcttcaaaaatgggatatttgagatctaagtaagagggaaaagaaagagcataatgggtagagaaaaaataggatccaggaagatacttagtacttctgagaactaaaaacagtcaagtcagtgtagtcagagttcaaagaaggagaaagaacatgatccaagaagaagccagaaaagtaagcagggactacatcttacacgatgatgtaggctgtattttagtttttacttatcttaagagcaatagaaaaccattgaagggtttgaagcaggggagtgacataatcaggtctgcattttaaggaggtcacctgctctattatgaagcatgaatggaggaggatggaaagagatattcagggagctggtttatgagtctgttgtaggccagaggtattggtagcttggaccagggtgatgatgctgaagattgaaaggagttaatagatttataatatatttgtgaagtaaagttgactgtacttagtgctgacttagatagtactggtgagggatgtcatggtaaactccaaggtactgggcttcttcaactgagtggaaaacactagagggagaccaggtaaaggttgaaggaaagtgaggaacagtagttcagtttggggatattttgatttggaggcctttttaagacttcctcaaagagacacagtgcagtcttgagtcctggatcagaggagatacctcaatgtataaatttgtaagacaatggtttatacacactattaaagccactgaggtaagtgagatcatgtacagagtgaaaatgaagtgagagaagaaagcataagtctgagccatgagaactccaacatttaaaggccaagtggaaaagttgacaagagtgggaattgtgactggggtagatgctagaggggcatctcagaggccaaggaaagagaatcatttaaggtgctgatgaggggtaaagtaagaaggtcctgtaaatgtcctcttggattaataaatttgatgttttgaaggactttagggagaatgagtttgttgtagtgatgggggcagaagccagaatgaagtgtcatgggaaatgggtggaagtcttgaaagagagacaatgaatatagataactcaagatatgtggtcaagggaaacaaaaaggataaggctttaactagaggaggaaatggagttaaaggaggagtttttttttttttgagacggagtctcgccatgtcgcccaggctggagtgcagtggcacgatcttggctcactgcaagctccgcctcctgggttcacgccattctcctgcctcagcctcctgagtagctgggactacaggtgccctccaccacgcccagctaattttttatatttttagtagagacggggtttcaccgtgttagccaggatggtctcgatctcctgacctcatgattcgcctgccttggcctcccaaagtgctgggattacaggtgtgagccaccactcccagccaggaggagtattttttaaagatgggagacttgagcacatttgaacaataatggggaagaccagtggggaggatcaggggtggcctgaagatagacagagggtggataaataatcatgtaggattcctgagaagatagaagaagttggatccagagcacagcagggggaattagctggccttggagaggagagatgatctctatcctctattctagaaggaagccaaaggtgatgtgtgcagatgcagaggtgtgtttgatgtggtgaagccaagtcaaaggagtttttgttcgatgccttatatctgctccagaaagcagttgagtcaccaactgagacagggagagagaaaggggctggcatactaggaaggaaaggggatcatttcagatatttgaggaggacagagtaagttggaatatgaaagggaataaatgagtgaaatttagtaggactgctagtcactgcttgaaggctcagctgaggctgatgatcatgaattcatggtactactgttagaattattataaaatatatgagcctttttggaggtgctcagcagtttaccagacacagaaaaacaggttcatctaggcttaggattttgtcagagaggtatgatgaaaagattgcaaaggagtttaggatattggcatgggcaagggagcttctggagtgataaaccaggaatctaagcctgctagggagggacatatagacaggagaaggagagtatagagatctttctgaaggttagaggaaatttgtaatcaaagtggttgattaaacaagacagaagtatagcagtcagtgatcagcccaggatgctgcaccccagatcaattaaatctgtatttctgggtgtagggcccatcccagtttctcaggagattccagtgctttccttaagggagaatattgatataactgttattaagactattgtgaaaaaacatattagcaatgtgaaatcaagacaaaaacacaaacacagaaagaagttagacaaaaacaaaaaacactgaaattacacattttctttttcacaaatcaaagtcaaattcacggaccttcttccctgactcattctccctgacattagaagtccaaagggagcaagtaaagtctttatggggaagatggtataattaagcaccaattacctagggaccagatgctttgggatttgactgatgaaaacagattagaagcatggtgaatttgttcactactgtctttttggaggggcaacactcctggctcacttggcatgaggtaatgtcagtctggctacaaagatttgaatgtggggcttgagtttctaaaaggggactgattggacttctcttagccaggatacttggacttggtggctatatcatggctcacagtgtcttggaatggtcttgagcctagttgaaatttgttgaaattacatatgaatattcattaatgtattacttggaactcagtgagaaggatcatcactgccagatttcctagttaggaaaacttaccttcattccttccagttaaatagaagaccattgtatagttcattttgggctaagtggagtgtttatgaaatgtgtagggcttataggcataactattgctaaagaaagcccagtaaagcttgacatcccctctgttgcccttgtctgtcattccataaatttaatgtcaagggcatttttagagaagatgatcacaggatgattcaggtagacatggagcaggttgtgaaaacactggcatgtttcaccaatgtattagggtttccagagaaacaggaccagtagggtgtgtgtgtgtgtgtgtgtagatttattttaagagattggctcacacaattatggagactcgcaagttcaaaatgtgcaaagtgggctagtaggttggagacccagagaagagctcatgttgcaagtcaagtccaagtccgctgcagaatttccctttgcttgggaggtcagtctttggctctattaaggcattcaactgattggagggcagtttactttactcagagtacatcatttaaaattttaatatcatctaagaacactctcatagaaacatttagggtaatgtttgacaacatatctgggcaccatggcccagccaaggtgatatagatatagatatagatagatatagatatagatatagatatagatatagacatagacatagatagatatagatatagatatagataatggatatatataatggatatataatggttatataattaaacattacacctgggaagttacagcactatcttctctggattaaacaacaacaacaaaaatactcagtccaattcatgatttgttgagggtctgtgtagaatatagaaattatactacaagtttggttttctttaggatggtgagcattttataaaatatgtatatataaagagaggcattctcttgtaacacttagaatagtcctgtacacatagaaggcacacagaatgtccagtgccagtgacatgagacttcataatgagtttgaagccaaagctttgtgtagtaaaaagccatgagcagttaataaatttccatttgatggcagctataaatattaaccagaagactcataactgtgttttcaactcacatacctgggttggggcagaagcaatagtttcagcagcttttatttatctgcttttaattccatctcaccattgttaaatttacctgaaataattgccattttgacaatgccctcaaaaatcatcttattgcctggggactgattttcagattcctgagcccagtattcagaatcctatatattccctcaacctatctttccatgtgtattttctgttgagcttcaaactgaactacctctttgctctcaacatattctatttgttaacttttgttcatgttattccctctaaaatgacttttctctaatttttttcattctctcattcttcttgtctttcgaggtggaactcaaatgccacaacgtcaaatgccacagtatctgctatgatccttcccctttccagctacaaattcctctttcctctaccacttctttggcacatttattaagactcgcgatttctctcatctaagtctcttgtgcaatgtcttactgtatgtggcctgaattcaggatctatgtctacagcctcccctttagcctcactccagtatcttgcaggtgggcagtcctctgtaaacacttgttaaaaaagtcaaaacacatttttcaaatcagaaagaacctaacatacaaagcctcattgtcatttttaaatttcatcgaagagctatacattgaattttttgtgtgttctctatagtacctagccatgtgctggacagtggacccacagtggacattcagtaattagtaatagatggatttattctgtatttaacaaaattttctggatgcttttagactgaaggagattggtttgatgacacaagtttcaaaagacaatgttattgctaatgcacattatgagggaactatgatatattttgaagtccaacaaatagaaaaatgaatcaatcacgagtcagatttattgatggaattgtgccaccatcaagtcctaaagcattagtagtgatgttatcagaaaatatcccactctgagatcatctgtagccagctttatactctaaaagaatagtctgagtatgttctgcctggaaaagggctcagtggtctaggaattattgtttttactttttcaaagtttataaacttggcatgactgtgcttttctgtggcttccaatctctggtgataagttttctcaaaatattcctgatttatcctgatgtaaatcacaattcataaatatcaagagagactgcctacagtaccatcttctgatttaaaaacacatttgaatcaatatttacttatatataatgcattctgctgaataaggaagttctgacttgttaagctcagtatgcttcgataagaaagcaaaatttttttgttgggtttttaaaatgtattttaaggtccttgtctcttggtgatagttctttacatattgaagtgccagggaataactgtccagtagctggacaagagagactcataatatggcagttgaagccaaagcattaagcaaaaacagttattaatattaacaggctcactgtagagagaagccatagttgtcaggggaggcagaactgcccaggaaacccatctttgtccttttgtctacacaggttggggcaaaagcagcagttatttgaactcagcaaacctgtgttccatattgaaggcctgcataagtcagggaccagggatgtaatgaagaccagacatggactttaggagcacaaagtgtagagataaaactgcactcataatgtaagctaatgggaggcaggaacgatggaagcagcaaagactcgctacagtgggaggagttatgagagacttcccagaagatatggcatctgagctgattcttaaaagttctgtaagaggccaacaggcagagaaaaaatgaaaaaatgctattaaacagtatagcccataaccgtggggatataccagaggatgatgtgttagggaaatggtaagtactttaaagtggctagatcagagaatgttcgagggcaggtgaagggaaaagtaggcagggttcttatatttatatcagtgatcttggactttgtctggggacctgcaggtagctgctaccagaatttcttatgtcagtaagtaacatgatcagatttgttattttagcaagacaacttacactataaagtatagagaggtgtttggagtgcactgattgaacagtagtgtggagatgtgttttttaataataaaccaaatgagtaataacatgtcttactcttacataattagtaagatcttgccagcatctttgttggatgaaaggaagcctagtgtttatcaccaaatcttttgagatgtcagtataacacaacactgtattccacttttgaaaacagccatccctatagtgtgtgaagagaatacttaaagtgcagacagacaagtgaacaccgcacttctttgtcacatgcagtcaagaaaccagacaagatatttaagctatgattattagtgttggcaagggttcagctccagggaaaataaatacattgagttagtggtggtgatgagattgacacgaatagagttgtattttccttttcatgctgttgcaagggaaatgaagctttaaacataatgaaattggttcttgtgaacagcaaatctgctatttcttcactttttatggctttgtcaacagtgatctaagttttgctttacttatttattttaaattttgttttattttaatagtttttggggaagaggtggtttttggttccacgaataagttctttagcggtgatgtctaagattgtggtgcacccatcacccaagcagtatacactgtacccagtgtgtagtcttttatccttcaccccctcccacccttctccctgagttgccaaagtctattatattattcttatgactttgcatcctcagagcttagttcccacttacaagtgagaacatacaatatttggttttccattcctgagttactttcagctccatccgggttgctgcaaatgccattattttgttcgtttttatggctgagtagtattccatggtatatatatatcacattttctttatccactcattggttgataggcatttaggcttgttccatatttttgcaatggcaaactgtgctgctgtacaaatgcatgtgcaagttgtgcaactgcctccctccctccatctctctctctttcctttcttccttccttccttcttttcttctttccttgttttctccctccctccctccctccctctatctctccctccctccctccctctctctctctttctttctttcctttctttctttcttttctttctctctctctctttctttcctctttctctagccctgccacccaggctggagtgtggtgccatgatctcagctcactgcaacgtccaacctctgcctcccaggttcaagcaattctcctgtctcagcctctgggattacaggtgcccacaaccatgcctagctactttttctatctttagtagagatggggtttcatcatgttggcctggctggtctcaaactcctgacctccagtgatccacccacctcagtctcccaaagtgttgggattacaagcatgagtcaccatgccccgcacaagtgtctttttcatataatgacttcttttccttcgagtagatacccagtagtgggattgctgaatcgaatggtatttctacttttagttctttaaggaatctccctactgttttccatagcggctgtactagtttacattcccaccagtagcgtaaaagggttcccttttcactaccttcatgccaacatctattatttttttattttttaataatggccattcttgcaggtgtaaggtgatatcacattgtggttttaatttgcattttcctgataattagtgatgtcaagcatttttttccatgtttgttgggcattcgtatatcttcttttgagaattgtctattcatgtcctttgcccactttttgatgggattatttgtttttttcttgctaatttgtttgagttccttgtagattctggatatcttgccgattctggatattagtactttgtcagatgcatagtttgcgaagattttctcccaatcggtgggttatctgtttactattattattattattattattattattattattattattgctgtgcagaagctttttaattaattaggtccaatttgtttatttttatttttgttgcatttgctttggggtttttgctcatgagttctttgcctaagccaatgttgagaagagtttttttgatgttatcttctagaattttaatgatttcaggttctagatttacatctttggtccatcctgaattgatttttatataaggtgagggatgaggatccagtttcatccttctacatggggcttgccaattatcccagcaccatttgttgactagggtgtcctttccccacttcatgtttttgtttgctttgttgaagatcagttggctgtaagcatttgcctttatttctgggttctctattctgttccattggcctatgtgactatttttataccagtgccatgctgttttggtgaatatggccttatagtgtagtttgaaatcaggtagtgtgatgcctccagatttgttctttttgcttagtcttgttttggctatgtgggctcttttttggttccatataaattttatgatttttgttccagttctgtgaagaatgatgatggtattttgatgggaattgcattaaatttgtagattgcttttggcagtatgttcattttcacaatattgattctacccatccacaagtgtgggatgtgtttccatttgtttgtgtcatctattatttctttcagcaatattttgtagttttccttgtagagatctttcaactccttcgttaagtatattcctaagtattttatttttatttttgcagctgttgtaaaaggaattgagttcttgatttgactctcagcttggtcattgttggtgtatagcaatgctactgatttgtgtacattgatttttgatcctgaaactttactgaattcatttatcagatctaggagctttttggaggagtctttaggattttctaggtatacaatcatgtcattggtgaacagtgacagttggacttcctcttttctgatttggatgcctttatttctttctcttgtctaatcactctggctaggacttctagaactacgctgaatagaagtggtgacagtgggcatgcttgtcttgttccagttctcaggcagaatgctttcaacttttccctattcagtacaatgtgggtttctcctagatggtttttattactttgagttatgtcccttctatgccaattttgttgagggtttttatcataaaagtatgctggattttgtcaaatgctttttctgtgtctagtgagatgatcatatgatttttgtttttaattctgtttatgtggtgtatcacatttattgactcgggtatggtaaacctacatccctggtatgaaaccactatatccctagtatgaaacccgcttgatcatgatgtgttatcttttttgaaatgctgctggattcagttagctactactttgttgaggatttttgcatgtatgttcattagggatatttgtacttttagttttctgttatgtcctttccaagtttaggtattagggtgatactggcttcatagaatgatttcctctttttctatctttttgaatagtttcagtatccaattcttctttaaatgtcagatagaattcagctgtgaatccatcgctcttggactttttttgttggcacttgtttttttattactgtttcagtctcactacttgttattggtctgtccagagttcctgtttcttcctgatttaatgtaggagggttgtatatttgcaggaatttgtccatctcctctagattttctagtttgtgtgcatataggtgtttataatagccttgaatgatcttttgtatttctgtgatatcggttgcaatatctcgtttcatttcttattgagcgtattcggatcttctctcttcttggttaatttcactaatggtttttcaatcaattttatttatattttcaaagaaccagctttttgtttcacttgtcttttgcatttttgttgttgttgttgttgtttcagtttcatttagttcttctcttatttggttatatcttttcttctgctttgtttgggtttgtttttttcttgtttccctagttccttgaggtgtgaccttagattgtctatttgtgctctttcagactttttgatttaggcatttaaaactatgaaatttcctcttagcatcacttttgttgtatcccataggttttgataagttttgtcatcattatcattttgaaagaatttttaattttcatcttgatttcattgttgacccaaagatcattcaagagcagattatttaatgtccatgtatttctatagttttgaaggtttcttttggagttaattttcatttttattccgcagttgtctgagaggatacttaatatgattttgtttttcttaaatttattgagactcgtttagtggcctatcatatggtctgtcttggagaatgttccatgtgctgatgaaaagaatgtatattctacatttttaggtagactgttctgtaagtacctattaagtcaatttgttccagggcatagtttaagcccattgtttctttgttgactttctgtcttgatgacatgtctagtgttgtcaatggagtactgaaatcccacactattattatgttactgtctatcttgtttcttaggtctagcagtaattgttttattaatttgggagctccactgttagatgcatatatatttatgattgtgatattttcctgttggactaatccttttatcattatataatgtccctctttgtctttttttttttccactgttgttgctttaaagtctgttttgtctgatataagaatagctactcctagactggccgcagtggctcacacctgtaatcccagcactttgggaggccaagatgggcagatcacaaggtcaggagttctactaaaaatacaaagaaattagccaggtgtggtggtgtgcgcctgcagtcccagctactcaagaggctgtggcaggagagtcacttgaacccaggaggtggaggtcatagtgagccaagattgcaccactgactccagcttgggcaacagagcaagactctgtcaaaaaaaaaaaaaaaaacctactcctgctcacttttagtttccatttgtgtgaaatatctttttccacttctttaccttaagtttatgtgagtccttatgtgttacgtgggtctcttgacaacagcggatacttggttgtcggatttctctccattctgtcattctgtatcttttaagtggagcatttaggccatttgctttcaatgttagtattgacatataaggtactgttctattcattatgttagctgttgcctaatactttttaaaattatgttattgctttataggccctgtgagatttatgctttaagaaggttctgtttgggtgtatttcaaggttttgtttcaagatttagaacacccttaagcagttcttgtagtgctgatttggtagtggcaaattccctcaacatttgttagtctgaaaaagactatctctccttcatatctgaagcttagttttgctggatgcaaaatttttgactgacaattattttgtttaagggggctaaagataggaccctgctcccttctgattggcaaggtttctcttgagaagtctgctgttaatctgataggtttttctttataggttacctgatgcttttgtctcacagctcttgattttttcctttgtcttgactttagataaactgatgactgagtgtctaggtgattatctttgcaatgaattttccaggagttctttgagcttcctgtatttggatatctaggtctccagcaaggccagggaagttttccttaattattcccttaaataagtttttctaatttttagatttcacttcttcctcaggaacaccatttattcttaggtttgactgtttaatatagtcccaaatttcgtggaaactttgttcatttttaaaaattcttttttctttgtctgattgggttaattcaaaagtcttatctttgagctctgaagttctttcttcttcttgttctagtttgttgctgaaactttccactgaattttatatttccctaagtgtatctttcatttccagaagttgtggatgtttttctttatgatatctatttctctggagaaaatttcgttcatattttgtactagtttttaaatttatttaaattgttttttgcctttttctggtaactccttgagtagcttaataattgaccttctgaattctttgtctggaaattcagagatttcttcctggttcggatccattgttgtggaactacagtaatctttgggggttttatagaactctgttttgtgatattaccagaattacttttctggttccttctcatttgggtagactattacttaaaattgtttttgtggactgtgttttttttttaatttcttattttttctttcttaagaatcagactctaatgtttattttagcctaattggagtcttggtgcttgtaggggtgaagactctgtacgagatccttagttacagaatcttcctgcactggttttccccaatgctgattttagtagttacatacttggtgtgtgggtgaattctctgtctcctgtgaagctggaatggcagggatcccttgacgcttatgtcctcctctcatggtatacagtttatttactggtcttttatttactgagttgatgattcaggcttcaggacaattggggaggtatcccccggcaggcaccagttgtggctaaggcaagtgggtagatgtaatacccaatggcgagccgaggtcacagccttgatgagggtggctggaggagctctcaattaggtgtgctgaaattttatcaaggtgaaaagtgggagcttcctcagctcccctgccaagtcagaaagaaaactattcacctcacagcctcactcctgtcctagcatttcagctattcagatcagacaggcatctcttttcatctataggaatgttgttgttccaagtagggaggaactgtgactctgcctctcatgcaggcctgaatctggggtttgctcctcttgtgggcgatactcaccctggagtgttccagaaaggctgtctacaggtgtatccatgtgtgttcctgtgggggaagccccagctgtgtctgcagtggagtgccagggggaacaaggactccttttccaaggcccttcatggtcacagaggctgcttgcctattggggtataggtgcagactttccctactgcacctggcactgcaattgggtctctgctgtgagaaactacccactagcagaaagatctgaaactcctactattcagattattttgtctcacttagtgattccttgatgtggtgttctcctctttcccctagggatgggcttcctgagagccagattgcagtgactgttattgttcttctgggtctagccacccaatggagttaccaggctctgggctggtgctggcgaatgtctgcaaagagaccggtgatctgatcagtcttcaggtctcctagccatgtataccagcacctgctctggtggaggtgacaggatagggatgtagactctgtgagaatccctgattgtagataggtgtagtgtgctggctttctcaaatgctagttatgctagtattgaagttgccacgtggacagactaaggacctctggttagccaggatgttgcaggcagtgatattagctgttgttttctccttcctgggagcaatattattgtcatgagtatggcctgagttggttggcctccagccaggaggtggtgtcttttgtgttcggctgccaaggcagatagaaaaataccatcaagtgggggcaggattaggcgggtctgagctgagactcttcttgggctagtcttgccacagccactatgtaggatggggaggatggttttcaggctgatggggttatgttccagaggggattatggctgcctctgtggcacagaatagttcaccagggaagtggagaatagccagtagtgaaaggcttcacccagctcccacacagttggtgagcccaatctcactcttgcaatgctgtgttaacagcaccaagtttagatccacgcctcctgcttgtggaactcagtcttactccaggccatacacttccccactgagaaagcaagcaaggctttcaggccacacccctccctgtctgcccacaaggttcctgtgctcatatctgctgcagttcccattcacccaccagattctgttcacgcaggttcatgccccctcaaaattatcacaaaattcatttggaagcttctttcaccttgtgccccctccctaattctgctggctgccttccctgagggcccctgtgagatatagtcaggcatggcttccctgggtttgagctggagactgggagtgcctacaagactcttcctgctgctgcttctacttttgtgtttcacgtggctccctaaatctgttccagctctaggtaaggttaaatccttctctcatgatctggattttcagattccccagtgaggatatgtgtttggaggcaggttttcccccattcacactttgggaactcattgctttttgcctgtctcacagagtttgcagcagcctgtcacttctttcaaaggatctgtgaattctttccattttcctgatatgatcctgtggtggttcttggaaaaaaggttcacagtctgagtctccacacactgttctgtccatccaagcaggagatgtatgttagccctgcctgctatctgccatctttcttctgtccccaatccttctctttagatagctgagataccatcttttgtttcttctgacttggttctattcactgacattcctctctatcaagtagatttttgaactttcatggaaatttattcccaatttatatggaaataattcccaatttatatgaaaagcttataaagtgattcattaaccaagtatttactgaggtgctaaaagtatactctgaagcaggagtggcaagtcctttgccttcatggagattgcattctcttgtaaatcttacatgatggtcactagatttaggaataaaggactccagcataaaacactgacacttctgctggagaaatattttacaaactatatatattgaagcccaaactctggtttattggtaaaggagtagcactgatactagaattttgtgatcaacatgttggaataagaagtcagaagacttagatctgtgttctttttctcccgctggctataggttgctttaatctctgagctgcagtttcctcatctacagaataggttagaccagattagtggtcttcaactttggctgtatattagaattatcttactcttgaccaattaggttagaaatttcgggccacacacaatggcttacgcctgtaatcccagcattttgggaggcagatacgggcagatcacaaggtcaagagatggagaacatcctggccaagatggtgaaaccccatctctactaaaaatacaaaaattagctgggtgtggtggtacacacctgtagtcccagctactcaggaggctgaggcaggagaatcgcttgaacctgggaggcggaggtggcagtgagccgagatcgtgccactgcactgcagcctggtgacagagcgagactccgtctcaaaataaataaataaataaaaattaaaattagaaatttcctggtggagaggaaagcagaggtatttttaaagctctcaggtgatatatttctgttttaaggtaggactaaaaatcatgggactacgtcagaagttctaattataaatctataggttagttttctccaggcatgggtatagtgcttaaatgccttttaaatttgttaccaacatagaaaaaaaaaggtttccggcttctcttgaaaaatggaaatattaggcaacagttgggcttatgtttctgagtggtaaaaattaaacaaagtaaacgagtctccgtttcatttgttcctgttgccttcctggctcttgaaggcattgtcatttgtgaaaactaaactagatggtctttaaaatctccaattatttgaattgcttatttccacatccagaaaagagacggtaaacaaactatacctttatctgtaagctagttggtttgtgaaatcaaagggaacttaatctttgaatatggaaaaatcccagggtccaatggaagagaaactccatctcattaatagcaggactccacagactgctatggaaaagacacccacccggggctaagagggagggaggcggaagaggacttaattcattttctgggcatttttaatgaagctttcccctctttcattatttcttatttgggagctggatcattagttgggatgtgactggctttccctggggagcaaaaaggagattaacagaggttttgctcgcttcttcctgtgatttactgtgggaagtctcccaggttcttcccttcgcttctctgtggccttcatcttcatggtttcttgctgtgtctctctgagagcaagtacctgggtgaaaaaggctgagtgtgtggttttttggcaactgcctggcattggatttaagtgggtatatttgaattactagaattttacattttataggttcaaaatatgcacttgaattctgtaggacctcttacccaaattgaataatcctttgtgccttgttaaattttaaaaagtcacactatcaacattatgacatatggcatatatgatggcaataataaaaataacacacttattgtccactttaatgtgccagcagtgttccaagtgatttgcgtaaatatcaaatttgttccacacaattatcctatgaactaaatgttattatttcctggtttataggtgaggaacacagaggctcaaagcagctatttgatttctcttatttcaaaattaggggaagtgagatacattaacctgtataaccagaccttgttaactgtttttggtaaattccaatgtgtattgattttcacaaagacaaatcacaccattgttatattaaatattaattttttcatagtccctcaaggtgcttactggctatattgttactgtcttttgatgttgtttatacatggtggattacagaattccatgaacataaaaaatcttgactttatcctagcctatttcctattcttaccccctgcaaagtaaaaagttcaaaatagcgttagtaagccaagcaaactacttactagccacatgaacctactagcctctctgcctcagtttctttgttgggaaaatggacaatacctaactcaactcataaggatatttctagaatcaggtgtaatatcaaataaaaatatatttcctttttcctagaagatacccatgtatatcttaggtactgatgtattcatagtgatgcagaacataaaatgtttattcttttgcttagcaacaactatccatagagatttttccactttagagatttaatcccattaaaggtttttagattgattggacaatgagaatgtttttgtctctctgaaactgaggctgaaagttgatttcattctctcacttcaaatcatactacaaggctacagtaaccaaaacagcatgtcactggcacaaaaacagacacatagacaaatggaacagattagagagcccagaaataatgccacacacctacaacaatctgatctttgataaagttgacaaaaacaagaaatggggaaaggactctctattcaataaatggggctgggaagctagctagccatatgcagaagattgaagctggacccctccttacaccatataaaaaaatcaacttgagatagattaaaaacttaaatgtaaaacctaaaactataaaaaaccctggaagataacctaggaaatggcattctcgacataggacctggcaaagattccatgacaaagatgtcatgacaaagatgtcaaaagcaattgcaacaaaagcaaaaattgagaaatggaaacagattaaactaaagagcttctgcacagcaaaagaactatcaacagagtaaacagcctacaggatgggagaaaatatttgcaaactatacatccgacaaaagtctggtattcagaatctataacaaacttgaacaaatcaacaagcaaaaaacaacccaattaaaaagtgagcaaaggacattaacagacatttttcaaaggaagacatacatgtggccaacaagcatatgaaaaaatgctcaatatcactaatcattatggaaatgcaaatcaaaaccacaatgagataccatctcacaagtcagaatggctattaccaaaaagtaaaagaaaaacagatgcctgtgaggttgtagagaaaagggaatgcttatacactgaaaagggaatgcttatacactgctggtgggaatgtaaattagttcagcaattgtggtaagcagtttggtaatttctcaaagaactcaaagtagaattaccattagacccaataatcccattattggatataaacccaaaggaatataaatcgttttaccataaagacacatgcatatgtattttcactgtggcactataacagagacacaataacaaagacatggaaccaaactaaatgtccttcaatagtagactggataaagaaaatgtgatacatatataccatggaataccatgcagccataaaaagaaatgagatcatgtcctttgcagcaacatggatgaagctggaggccattatcctaagtggactaacacaggaacagaaaaccaaataccacatgttctcatttataagtggaagctaaacattgggtacatatgaacacaaagaagagagcaacagacagtggggcctacttgtgggtagagggagggaagaggatgaggattaacaaactacctatcagatactatgcttattacctgagtggcaaaataatctgtacaccaaacccctctgacatgccatttacctatgtaacaaacctgcatagtacccccgaacttaaaagttaaaagaaaaaaaaatgattaatgagcgtgataccagaacaatattatgatgcagggctattttttgtgtgtttgctagctgggcttgagatttgataaataagtcccattgtcctaatccgctagtgatgatgttctagcctttgaaattcaaactactactactccactttgagagagactgcatgagaattggacccagcctggggctttagacaccatggttcaaatcttggctcttatcattttttagccacgtgtcatggactcaatgtttttgtctcccagctccccagattcacaggttgaagccctaacctccaatgtggctgaatttgagattagggcctgtgaggagctggtaaaagttaaatgaattcttaaggataggtctccaatcctatagagttggtgctcttacaagaagaggaacagacacccgagttctctctctttgctatatgaggacatggtgaggagtggccatctgcaagctcagaagagagccctcaccaggaacttaagtgtctggcaccttgatcgtggacttcccgacctccagaactgtgagaaataattttttgttgtttaaatcacccaaactgtagtattttgttgtggcagcccaagccaattattataccatgtaagcaggttacttaaatttactaaatatgtaagttacttaaaatttcaaatcctggttctaactttactagctatcacttttactagctaacacattacattttcttcaacttgccgcatgcttttgctgtgagttttaaatgaaattgcttaagtactttgcttatcatactgctgatccatagtaagcacttaaagttagtttccaggaagtttggaatggatctcacttatgcaaatggttgactttgacggtgcttgttcctctctggaaagggttcacctcccattagaatagtcctgtgactgcagtaattttgtatgttaaacttacatgtatatctgcagaatgttaaatctgcaaacaccatccatcaacccaaaagcaaaaaaagagtgtttcctaatagttaatagttggtagcttaataggaaatctagaaaaaaaatgtttaataatgaaggctatattaataccaagtctcatttgagttcctgtcagtaaggaaatagttatctttcgttgttaatcaatgaagaccagttgccataattagggctctggtgtgttttcttcacatggtcttctaggacctaatgtaatatcatttgagaggctcaaagaggatcccatattcccaaaggtatcttagagtccttagctgcccaacatcccaccattaatcatgctttgcagatgaaaaattgaagactccttgtctctgaatatctgggatatgctttcattcctaggatggacatttttcttcttccccaataaggaagaaaaagggacagaggtgatttataagagcagttctactgagtgaaatgtgggtcctagcaaaggaggacacagctgccccttgtaatagtggagggaaggaaggaggcaggctggctgtactttgccctcctcaaccctaaaccctatctgtttaccacagtggaccttttttctgaactctaacctcattatttcattcattatccacgtaatattcattaatgttctccaaggctcttagaataaatctttaacatttccccaaaaagtcacaaggtctgacacctgccttcctttttccagcttcctatcataatcctcctttttggcagtggccacactgatcttctttcaggttcccaagctcagcatttgcttttcattgggagccccttacatcatgactgtcagcctgattgtcatttctttggggaggccttccctgaaccctggaactggatcatatacccctatcatgtgctttcatagcaccatgaatgtctccttggtggcagtccccagtaggagaattctgtgtttatctgtatggctgtttcataaatgtttatcttcctcccaatagtctgtcagcactttggcagccagttgtgttttgctgttgattctacctccagcacagaatgtctcttagtatttatggaaggggacatgaaaaaagaaaaagtccactgcatgaagatttaatccagcgacactgaggcctgaacatctagctttagggaagccagcttctagcaggacagactggtagggactaggtaaggagaatggaaaaacacagggaatgagcatcactttctttaagactttgcctctggcagacccctccaagtaacagattccaaagagattgtgaatgttctccctctggtatgcagtctcctgtcctgtcagaaacatggtacccagaggccaaagctgctgcataagcaagttatcatgaaactattccaggacaggtttcagaagcagggtcttaaaaatgagtattaaatctaatgttcacccagatacatttccaacccacatatagacaccgaatttaacgatgaaagtggaagttactctgttgaggatttatttgaaatgttggttttctcttgtccatctgatacaggtcatagctctgtttctgtcattagattgattttcatgtttctcagcacagactctctgtgagtcagagataagtttaatttttcagcatggccataggaatgatgaagtcattcctcattaaaatgaagctaagcaaaatttaatagtacttgtttaagattccttatttacttttctacacaaaaagagttgcaaggggaaaacaaaaactttagctttgagtaatttccttaattcaaatatagatttaaaccactttgtcataatatgtaaatgaactattgcttttttcaccacaggtctgttttcaaatagataatgagattatataaataattaccttatataaacataaggttactcattattgaaagcaattttctttttttgtttctggtttattatggttaagagtgagcctttgttttagatatttgaaaacaaaatgtgtgtgtgcgtgtgcttttgtgtgtgtgtgtggatatgtgtatctagggaggtcctcaaattcaaaaattataatacaaggttgtaatgtcagcacttcctattgcatagttttataatggggatatatagctatgcattaaaatgcattattgaaatggaaaatcaggatgtgttaaaaatgaattagtaattatattaagatctgaatgggaactagcatacaatgtaacttaagcttttgaaaaataaaaaaaaacagaaaataattaatgataagttagtttcagtattacattgataaatatttccagaataagctataaaaaataaggaggtagatttattattttaaggttcatactaaaagattgtaatatttacttaacctttctttatttaatttagaataagattactgtcatctctctaagcatctatgtaatagtgttttatttacttttccattaaatattactgagataaataaggagtcctggtgaatgaaatataatttaataagcagagttttcttaggtgaaaactaatcatgtcctgctataaatgtatattgagagagaagctgaatagacaagctccatgatttagtcaatgatacgacttcagggaaaatgtttttatgccttgttggccatatcttttaatacttgcattgaaaataaaattacatcccaagattatgagggttgtgaaattttataattagatatttaagtcctgaattgattagcagcagtataaacatagacatggattttgggttaaatctgagaactatttttttgtactaaaatttgcgtgcagatgacaatgggaaaatcaaatgttttcctggaaaattttcaaatgggacaaatagtcatctttctggaaatatgaaataaagggagtggtagtggttggactataaacctctttgaaggccttttaatctttagctgtaattcatgttttatcaccattggattttcaaaacggaaaataccttagaaataatttagtgggccgggcgcggtggctcacgcctgtaatcccagcactttgggaggccgaggcgggtggatcacgaggtcaggagatcgagaccatcccggctaaaacggtgaaaccccgtctctactaaaaatacaaaaaattagccgggcgtagtggtgggcgcctgtagtcccagctacttgggaggctgaggcaggagaatggcgtgaacccgagaggcggagcttgcagtgagccgagatcccgccactgcactccagcctgggcgacagagcgagactccgtctcaaaaaaaaaaaaaaaaaaaaaaaagaaaaagaaataatttagtgttaccttgttgatattaccaaaaaaaaaaaaaaagtgctcagagtcacataacttgattcagtcagagctggtactagatgctcagtcttctgacttctaatttagtttgctttcattatctacttactacctgctgctgactcagagctcctcagctatctgcaagtggatgtgtttattgaacatttacgatgtacatgaactgctctcaatgcgaagctcccatggtgaatgggagcttactttctgactcaaaaattagttttctctctttgtgttctaaatgaaagtgtccttttgctttatctgaagcagaaagttgtaagtttgtttattttacttttgaaattttggagaattggcagtggggtcatgccatcagaaacacatacatgcaatgcatggatgcacggtgtgaatgagctctctggaagatggtagattatgggaaagaaggaagctcagaaagagagtggaccaagtcaagaggaaagagagaagaaacaggcaagtgtggagcagaggaaaagtaggagggtcatgaatccattctgcaggtgtgtgctgagtgactggaagaaggaaaagaaccaaggaagtctctgccatgttatcttagttttgttaagggtataaagagattgaagagagtttaactaggccatctttaaccctaggacatccctagagtccctggcagaactaataatctaaattatgaatggctgtgtgtgcacacacacaggatgcacttactaatgtctatcattatgagtatcttctgacttctccactacaaagaaaggaagggaatgtgaccctctttccaggttagaagtaactagggcatagtaacacaaatggatgaattaaactgtttaaatggtgcactggaatatatttattttggggcaaatcatgaagaaataaaaaaggaagagattctcttttgagaaaaagtttgtttcctattgtcaattgagcaactctgtgaacatcttaaagataaagaatgattattctgtaaagtgctgggatttctggtgctgtgtgacaaagtccggttccttttgtctaagttagttataataatctttaatgaaaagcagaggggtcccatggtttggaacaagtatctgagtcaagagttgacaagtagaatagctgggcgcagaggctgctgtcaagttgacaaagccagaacagtacatttggacagaaagaatttgattttcttatactgaatgtgatgatcttgaagaacagattttttttttgcatgaaaataaatctttattttcagttattacccaccagtaagagaaagttaggttaagggtataaagggattgaagaggtttctacttttgcccagtccttattttgaatagccttccactcatccaaagtcatctcttttggaccctcctcttttacctcttcaacttcattctccttattttcagtgtctgccactggatgatgttcttcaccttcaggtgtttcctcagtcacatttgattgatccaagtcactgcaattataagatatttgtttctgaatgtatttgggggactctgttaattcatctttgacaattccccagttgtgagatctgctacctccacgttacaggtcctcgtgcttcaggccactgtaatgtgaaaaaaaagatctatcacttccactatacctatcaaattcacgtttgccacgagaatcaaatccatctccttggcccatttcacgtccactgccctctcgacctcttccaagaccaccatgaccttgaataggtcggtcaataatcagtctatcaactgaaaattcgcctccttcacccctttcatcaagtggcttttcaagtcttcgttcacaaggtggtctcctttctggtcttctatcagttattttcccttcaccgtgaagttgttgagcaggtcttcttccaacttgtcttattccttcttctttttgtgttttttatttttcctctaggcaagctttattctttgattcctctatccaggaagggggctgttggttgcatcttacccaaatggaatgcaatgggaattgggagcttgagttgtgtggaggaggagttgtcaatcttaacaaatgactatagctggcgtgtggtgtccatcaatccttgagggcttggccatgcacactagggaatggtcagaacagactcaacagaggtctccagagctttacaatatctacaatatcaaggttcagggggtatagacagtaaggaaaaaggccatttcctgtttctgtccatttttggtacagtagacagttaaggttttttcttttgactagcttttaaaaaattacttagaaaatggaaagcttataaacattcataagtgaattgttgaattgctaccccaagtggtttccttacctagtcaccacttaaccagaaatactagaatacacggttcaaccagaattcaaccaggcagataacctgcctattgctcaagcaatcatcagagtttttaaaaacaaaattaagcaaaaaagacctttccccaaatacaatcattactttgtatgacccattcctaagaaagctacattccatttcagaaaacatgaccacttaaggtacagttaaaacaaagtcgttgccttcaggtgcttactttctgttttctttaaattaactgctgaaatgtttatcttgtgttttgtgctgcattcctgaaaactgtaacttttaaggacataggcctcatctttataaaggaagaagaaaacagcaaagaggtgtctcatttgggaggcagaaggttatgaccaatgctggaagtcttcctcttccttacttgttgttcaacaagatgggttctgtggtgtcgcatgaggtgtgagttggaaatgaaagctgcaccacacttcttatattcatagggcttctccccagtgtgggttctctggtgcaccgtgaggctcaacctctgtctgaaggccttcccacactcattacacatgtaaggtttttctccattatggattctctgatgaataagtaggtatgagctacatgtgaaggccttcccacattcattacacacaaaaggaagatctccactgtgaattctctggtggacaaaaaggcaagagagctgactgaaggcttgcccacattcactgcagtcataaggtttctctgcagtgtgaattatctggtacataataaggtgtgaaaaacaactaaaggttttcccaaactcacactcatatggcttctcaccagtatggcttcgctgatgtacaataagatttgcaatctgcgtaaaggctttgccagaatcgttacaggcagagggcttctccccagtgtggatcctctggtggacaatatggtttgagctcccagtaaatgttttccgacactcattacatttacagcatttttctgtaatgtggagtttctggtgccgagcaagttgtgagctataactaaaggctttctcacatttactacgcctaaaggttttttctaaggagaggtttttttgatatacagtcagatttgaactctgattgaaggctttcccacattttgagcaaacataaggtttctgtccagtgtggattctctgatgcacatcgagctttgcactctgaatgaaggccttcccacactcatgacattcaaaaggtttctccccggtgtggattctctgatgcacaacgaggtttgcactctgactaaatcctttcccacacatgctacaatgtaaaagactttcgcccaagctgggttttcggattgttaacagtgtcagaattaaggctgtattttcccacagatttcttacatttctggtcttcctcttctttgaagctttcaggtaagtgacagtcattcactatgacttatctgaaatctttcctttccctccttattctctgcctctttaacatgttttctttttcacaagcctctcttaactcaggtccttaaggatcagctttctggattcttcctaatatgatgcgggggttttcagcttcctcacgtatctcagtttttggaaccagtaactgaaggttcttggtttcagcaccttttcttcctcttctgatccatcaaggcctgtctgacgaaactcccctggggcccagactttgatgttctcagagtgcacttgttggctggatgcctgatctgggaagttttcttcttcctcctcctcctttttcaccttcactgggcggcatgggcctagggccatggcttctctcaattctgcagtcatcttctctgctcagcaggggaacgcctatagctgggagctgcccagcacaggtcaaaccccatctaagctttatgtttcaaaagcttcttcttgagtttcctcccagggccaagatgagtattgcctacgtgcgcagctgagaggcccgaccagagttcactggctctgcagcaggaggctgggggaccaggacctcagctcctactggcacgagaacaatgacccttattccttctttcttaagcaccatggacggctgcgtctcctctttcctgtcaaccacgccaacgctggagggcagcgggttcttgctgtctttctgggactccttgcgcagctagctatttgcctgccgccttggagttggtctgggtcgcagcctgagctgccgctcttggccccagagacgccgcccccgccagcttcttttttcttgttctctcctgccttcagcacctcgaaggggtccgattagttgtcaaataactggtcgaatcggttggtgaccaggcagctgaagccttcctgtaactgcccaggcatgatggttgctcggcggcacattcctccacggattgcagcgggctgcgccgagccaagagcgcgtgcttcagctcttcccagaagatcgaagaacaatttttttgaaatccgcctgtaaatgtcaggcaaggtaaatttcaaaatgaatttttaaagtctctaaaatggagttatgtttaattatgactttatgacaaattaaaagatagttctagataatactattgtagaaagaagcttctcttgttctgggaaagagagacagtttggaaacttgagacaagacccttattgtctgttttattatttactgctaacaaactgcattctctcactgttcactggaataggtgggtccagggaacttaggaaagcctaatgggaagtgagaaaagtaaattatttcttatatttttatgtatacaaatagttgataaaggaggaagtgtagtggtggggtggatcatgcagattgggatacaagagacagtataattattcacaattatagataaggagatctaggcttcacattttcacttctggaatattccactttgacagaacagtctactgtctgcctcagcctatcctggagatgtccttgtggtgggagaggacctgctttctccttgctgtgctcctacagtttgtctctgccagtcatgtccaagccccttgtcttagtgcctcacaagacctcttcctctgaccaggattcaggcaccttctcagaaccttcattcccctgacagcaggaccagccagtctcccagacccggggtagtgcgaagaggagagcagactccttagacccagagtcccaggacacttggcctcaattcccgtgacacctatatcacccagacaactgggaaatggaggtgctggtgccagaacaaaagcataagctgtgtttctcaagtttggactttacctgggctgttgctttattttctagctgtttactgatttttagaagcataaaggtttctttctgtgaagttcctagggacacttaacggagtggggacaggtattccttttgtctttcagaaaggcatgttaagagttagtctcacagtaatttaagtctcacctcctaaatggggtaagagtggggagaaatatatgtgtgtatatttgtgtgtgtatataaataatatatatatactactaatataattaataatgtgtgtataaataatatgtaaataacatattatattatatgtcaataataaaatattatattaatatatgttattacattaatatactatatattataatatataagatataattatatattatatactattatattatatctataacataatatattatatatttatatatcattatataatgtattacatgtattaatatatattatctatatagtaaatatatggggtgtgtatttgtgtatacacacacacacgcacatatatatcctgcattgtttgcttagaatcatgctttgcaattattaactgctttttcttccttcccttcatctaatacacctgaagaatatttcagttagccaaaggtgagaatccgaattcatatttgtattcccaatagatttcccgcagaatcttgggttatcatttcatcaataacagttatgcagatgttctattgctgtgtccaatgcttgcttcgttcatatgaaatttgacttttggccattcaaaaagcaatcagtgccttcttgttgattagcactaatcaccacaagatccttccaatagtaaattttccagagcaaaattctaaacttacagattagtttgccgcagcccctagccctacactgtaaggatcttgctttccatgaggtccattgttaaatggaaatgttcccctggctctatgcagtgctcaggtgtttcttactcagctgaaggactaatgaatttagtttgaatctaaatttggagtaaaaaatgccactcaggagagctgcttctgtgactgcattgccttccaacctgcttttccatttttccttattactccatgtccttgaggagtttattcctttatagcttttgtgatctggctgtaattattttgaaaaaaattttcattatactggacattttggattaagtcctccaaattttcttatttgtgagagtacaagtcactatttacactatggtaaactgcatgcaaacatctgagtacctttctgttcctgtcttcagctgggccagcactaagctggaatagcctatactttgatgtttttctgaggaagtacattttccttttccctcagattcctggtgcctggtatagcacttttttgatttgctcttgttctggcaataggtcaactggctttcatggtccttaacgtttcaggtaaataattccaacagttgtgactggaaggaattcaaatcaactcaaggcatccactctatgttcaaaatgccatgttttgagtgatttgtcctttggttagtaactttaaaaaatatgaggactggaaggagaagctactatttgaggaactaatggaaaatcaagcagtttttgatgtactaacatatacacttatgatgcaaggagtgtgatcgttgaccttcctacttatctaaacattatgctctcagagcatgtggataggtagcatagcctagtggttaacacacatagaaaagtcagactgcctagttcgaatcccagcttcatcacttgctagctatataatctttattaaattagttaactttcctgtgcctcagtctggttttcctgaggattaaatgattttatatttgttaagtgcctagaactgtagctggtctgcaacaagtactatacgtctttgtttaaataataaataaaatgacagtattgttcatatggagaaacaggggtcttaggcagcttaggagtttttctaaagtaacagaatcatttaatggcaggaacaacaatattatcactgcccagaaccctaatggagaactatagctcttaagggtgatgtggggagaaatacactgatgaaaaacaatcaacattattaaagacaggatgggagagagtgggaactcgtcattcatttatctaatggcttagtcagcaagtaactaatgcctactttgggccttgacactataccaacattgtgcagaaagtgattaaaatgcaaaagaacattcacttaggctgggataaacaagaggtcttttgcaaaatctgatgatgagcttgttgatgttgagttgacaaactatgcagcaggtcagtgggggggtgattatcataaaattccatcccttaaacatctacaggaagatgattattttaagatgctttacttctggagatgtatgctttacttctacttagagaatctggcttatgttctcatgttctggttttatatgtaattggtcatgagcttaatttgagccaagcatttgacacagttgcccccagaagttaactcatttgtggattgtataaatgctattgcacaaaaaagaagtatatatatacaaatagtcatagtagaccacatctcagttaatggcttcaagtctagatgaaatgttttaagagggatattgacaaattagagaacattagaagcatttgccagaatactggcagggcaagaaattatgccaaatagtagaaagagaattagatgcctaagtggaacatggtgtatagcccataagaatttgaaggattgtcactggtagaataagatgttattcttggctgcttccagctgaggagtggtggatgggtgactaaggcctataagagagcaaatataaggaagagtttctagatattaaaatcaatttccaaagaaacagcctggcctctaagggaaagagcttcttgtgagtagatgtgtttaggtggggccagatgaacaagctcctgagctctagggattagactccttctgctggataggaggtacaaccaggtcatcccagaggttccttgtgttccaagattctgttactctatgatttcatgacttggatgtcacctcccttaggttggttactctaaataatgttaaaagtcagtgtatgccttaagattgggtgaattgctatgacagaatgagatttaccagagaagcagttaagtctaagaatgaaactactgtttctaagtgaaagaggtatgaataacctaaagataatatttttctctgtagatagaaagaatttgtattataagtctgtgttgggtgtatagtagggcatcaccagaattcaccctaactgggtgaattcatggcagtgatcagtagaatatgtagtttaacaatgaggccttatcatttctaagtagtttctttttgagacggagtctcaccctgtcaaccagagctttgccctggaactcttggagtgcaacggcgcgatctcgggtccctgcaacctccgcctcccaggttcaaacaattctcttgactcagcctcccgatttctaagtggagagttatgaatggcccaaagataatatttttctctatagatagaaataatttgtatgctaggtatgtgttggatatatagcaggacattaccagaattcagcctaactcggtgaattcatggcagtgaacactgcaatatgtggtttaataatgaggccttattcttaaggcaaagctcagaaaagctgataagcaaattagaaaggtctattgaaaagtgtctgttggccgggcgcagtggatcacgcctgtaatcccagcactttgggaggctgaggcgggtggatcatgaggtcaagagattgagaccatcctggccaacatggtgaaaccccgtctctactacaaatacaaaaattagctgggcatggtggcatgcgcctgtagtcccagctactcgggaggctgaggcaggagaatcgcttgaaccatggatgcagaggttgcaatgagctgagattgtgccactgcactccagcctggtgacagcaagactttgtctcaaaaaaaaaaaaaaaaagaaaagtgtctgtctagccaggcgtggtggttcatgcctgtaatcctagcactttgggaggccaaggtgagtggatcacttgaggtcaggagttcaaaaccagcttggccaacatggcgaaaccttatctctactaaaaacacaaaaaattaacaggatgtggtggtgcacacctataatcccagctacttgggaggctgaggtagaagaatcgcttgaaccgaggaggcagaggtagtagtgagccaagattgtgccacagcactccaacctgagcaacagaacaagactcagtctctgaaagagagagagagatgaaagagagagagagagaaagaaaaagaaagaaagagagagaaagacagacagaaagaaagaaagaaagaaagaaagaaaaagagaaagagaaagaaagaaagaaagaaagaaagaaagaaagaaagaaagaaaagaaataaagaaagaaagcaaagtgtctgtctgccaacctgcttccacaaaggcccctcttctgattgtagaagtgcctggtttaggatggcagtgtgctctacctgctgtctggtgagtagtcaggattggacttctataagacaccctctgagaggcttgcaaataccttcagaatcaggcagaggtctttggccagttatttctgaataaagcatatctgcgtgtctgtctgacctaagcctgggaaccacgatggaagatactgtttgaacaacaacaacaacaaaaaaaggcagggaacttaagagagaaatggattttagtcactaagaacacgaagaggaacattttgataatatgtactctatacaaacagaatgcttatacaagacaatcaaagaggaatgggtagttttctaaagagtaaaacctgtatttttaggaacatatatttgtttacaatatattttttcttttttcacccttgatttttaactatttaataattttctacaacatttttttctttttttttttttgcccttttttttttttttttaaacagagtctcgctctgttgcccaggctggagtgcaatggtgctatcttggctcattgcaacttccgcctcctgggtttaagtgattctcctgcctcagcctcccgagtagcttggattataggcacctgccaccacacctggctaatttttgtatttgtagtagtgacggggtttcaccacgttggccaggcttgtctggaactcctgacctcaaggcccaccttagcctcccaaagtgctgggattacaggtgtgagccaccgcgcccagcctgcccttgatttttaactatccctcctgtgaaaatttaagtctttctgtgggttaaagggaactggtaaagagcactggatttatgcttgggctggaatttccctctaggtttggatgtaatgaaggcagtagagatttgggtttataacagaggcagatttgtgaaactataggagttgaagcctgagggtccctcacttgcagagaccccttccagggtcctggaaggaaccctgctaatgtgttattatggtcattttttttataaaaattgcaaaacataatgtgtttcagccatgactggttaagatcattgtcttcttccaattcaactttccctcctttctccttccctttctagttgggtggcattaaagtggtcatgcgcattttgtatttgtaattatgtattttttttttttcttaaaaaggacccccccaccaaattgtataagtttcaggccctaaaaacatggatcttccactgggtgtaggaatggaatgagtaacaatttggaaattgcctgtgtagcagaatcagcgaaaagtcagagtcagcagtcaaaatgtgatggggagagtgagagtaaattggaatccataatcccaacagcatttgacagtgggaaaatggagctttttcccccctctttagggttcattttaaagaattccatgcaaaggatatcatgaattgagaaatatacatcagattcatcagattaaaaattttttttttttttttgagacggagtctcgctctgtcaccaggctggagtgcagtggcgggatctcggctcactgcaagctccgcctcccaggctcacgccattctcctgcctcagcctcccgagtagctggaactacaggcgccaaccaccatgcccggctaattttttgtatttttaatagagacgcggtttcaccgtgttagccaggatggtctgatctcctgacctcgtgatttgcccgcctcagcctcccaaagtgctgggattacaggcgtgagccaccgcgcccggctttttgttgtgttttttgtttttgtttttgtttttttgagatggagccctgctctgtcgcccaggctggagtgcagtggcacaatctcggctcactgcaacctccgctcccaggttcaagtgattcccctgcctcagcctcccgagtagctgggattacaggcacgcgccaccatgcccggctaaattttttgttttttagtagagacagggtttcaccattttggccaggatgatctccatctcctgacctcgtgatgtgcctgccttggccttccaaagtgctgggattacaggcgtgagccactgcacctggcctaaattctttttaaaaatagcaaattcttaaaaataatgcaaattgatgatgaattatgaaaatcatgatgagaaactcctgactgaagagagaaattgttggaaaatgattctccttttcctctactactttatgtaattataaagcctttttctaaagttcctttctgacacagaaatactggccaacagaaattcaaaggaaagttgagacttttgaagttcaggcaatttatatggtgtttcaggtgttactacctctaatagtctatcagtaaaaccctgataggggatggtctctcctttttgccttctactccatctcttctcacacacacttgtgattctttttctttttttaaaaaattttattattataatactttaagttttagtgtacatgtgcacaacgtgcaggtttgttacatatgtatacatgtgccatgttggtgtgctgcacccattaactcgtcatttagcgttaggtgtatctcctaatgctatccctcccccctccccccaccccacaacagtccccagtgtgtgatgttccccttcctgtgtccatgtgttctcattgttcaattcccacctatgagtgagaacatgcggtgtttggttttttttccttgcgatactttgctgagaatgatggtttccagtttcatccatgtccctacaaaggacatgaactcatcatttttatggctgcatagtattccatggtgtatatgtgccacatttgcttaatccagtctatcattgttggacatttgggttggttccaagtctttgctattgcgaatagtgccacaataaacatacgtgtgcatgtgtctttatagcagcatgatttataatcctttgggtatataccccagtaatgggatggcaggttcaaatggtatttttagttctagatccctgaggaatcgccacactgacttccacagtggttgaactagtttacagtcccaccaacagtgtaaaagtgttcctatttctccacatcctctccagcacctgttgtttcctgactttttaatgatcgccattccaactggtgtgagatggtatctcatagtggttttgatttgcatttctctgatggccagtgatgatgagcattttttcatgtgttttttggctgcataaatgtcttcttttgagaagtgtctgttcatatccctcacccactttttgatggggttgtttgtttttttcttgtaaatttgtttgagttcattgtagattctgcatattagccctttgtcagatgagtacattgcaaaaattttctcccattctgtaggttgcctgttcactctgatggtagtttcttttgctgtgcagaagctcttgagtttaattagatcccatttgtcaatttttgcttttgttgccattgcttttggtgttttagacatgaagtccttgcccatgcctatgtcctgaatggtattgcctcggttttcttctagggttttcatggttttaggtctaacatgtaagtctttaatccatcttgaattaatttttgtataaggtgtaaggaagggatccagtttcagctttccacatatggctagccagtattcccagcaccatttattaaatagggaatcctttccccatttcttgtttttgtcaggtttgtcaaagatcagatagttgtagatatgcggcattatttctgagggctccgttcggttccattggtctatatatctgttttggtaccagtaccatgctgttttggttactgtagcctagtagtatagtttgaagtcaggtagcatgatgcctccagctttgttcttttggcttaggattgacttagcgatgcaggctcttttttggttccatatgaactttaaagtagttttttccaattctgtgaagaaagtcattggtagcttgatggggatggcattgaatctataaattaccttgggcagtatggccattttcacaatattgattcttcctacccatgagcatggaatgttcttccatttgtttgtatcctcttttatttccttgagcagtggtttgtagttctccttgaagatgtccttcacatcccttgtaagttggatttctaggtattttattctctttgaagcaattgtgaatgggagttcactcatgatttggctctctgtttgtctgttgttggtgtataagaatgcttgtgatttttgcatattgattttgtatcctgagactttgctgaagttgcttatcagcttgaggagattttgggctgagatgatggggttttctagatatataatcatgtcctctgcaaacagggacagtttgacttcctcttttcctaattgaataccctttatttccttctcctgcctcattgccctggccagaacttccaacactatgttgaataggagtggtgagaaagggcatccctgttttgtgcccgttttcaaagggaatgtttccagtttttgcccattcagtatgatattggctgtgagtttgtcatagatagctcttattattttgagatatgtcccatcattacctaatttactgagagtttttagcatgaagcattgttgaatttttacaaaggccttttctgcgtctattgagataatcatgtggtttttgtctttggttctgtttatatgctggattacatttattgatttgcatatgttgaaccagccttgcatcccagggatgaagccagcttgatcatggtggataagctttttgatgtgctgctggattcggtttgccagtattttattgagaatttttgcatcaatgttcatcaaggatattggtctaaaattctcttttttggttgtgtctctgccaggctttggtatcaggatgatgctagcctcataaaatgagttagggaggattccctctttttctattgattggaatagtttcagaaggaatggtaccagcttctccttgtacctctggtagaattcggctgtgaatccatctggtcctggactttttttggttcgtaagctattcattattgcctcaatttcagagcctgttattggtctattcagagattcaacttcttcctggtttagtcttgggaggatgtatgtgtcgaggaatttatccatttcttctagattttctagtttatttgcgtaaaggtgtttatagtattctctgatggtagtttgtatttctgtgggattggtggtgatatcccctttatcattttttattgcgtctatttgattattctctcttttcttctttattagtcttgctagcattctatcaattttgttgatcttttcaaaaaaccagctcctggattcattaatttttttgaatggttttttgtgtctctatttccttcagttctgctttgatcttagttatttcttgccttctgctagcttttgaatatgtttgctcttgcttttctagttcttttaattgtgatgttagggtgtcaattttggatctttcctgctttctctggtgggcatttagtgctataaatttccctctgcacactgctttgaatgtgtcccagagattctggtatgttgtgtctttgttcttgttgctttcaaagaacatctttatttctgccttcattttgttatgtacccagtagtcattcaggagcaggttgttcagtttccatgtagtagagcggttttgagtgagtttcttaatcctgagttctactttgattgcactgtggtctgagagacagtttgttataatttctgttctcttacatttgctgaggagtgctttacttccaagtatgtggtcaattttggaataggtgtggtatggtgctgaaaagaatgtatattctgttgatttggggtggagagttctgtagatgtctattaggtccacttggtgtagaactgagttcaattcctgggtatccttgttaactttctgtctcgttgatctgtctaatgttgacattggggtgttaaagtctcccattattattgtgtgggagtctaagtctcttagtacgtcactaaggacttgctttatgaatctgggtgctcctgtattaggtgcatatatatttaggatagttagctcttcttgttgaattgatccctttaccattatgtaatggcattctttgtctcatttgatctttgttggtttaaagtctgttttatcagagactaggattgcaacccctgcctttttctgttttccatttgcttggtagatcttcatgcgtccctttattttgagcctatgtgtgtctctgcatgtgagatgggtttccttaatacagcacgctgatgggtcttgactctttatccaatttgccagcctgtgtcttttaattggagcatttagcccatttacattcaaagttaatatcattatgtgtgaatttgatcctgtcattatgatgtcagctggttattttgctcattagttgatgcagtttcttcctagccttgatggtctttacaatttggcatgtttttgcagtggctggtaccggttgttcctttccatgtttagtgcttccttcaggagctcttttagggcaggcctggtggtgacaaaatctctcagcatttgcttgtctgtaaagtattttatttctccttcacttatgaagcttagtttggctggatatgaaattctgggttgaaaattcttttctttaagaatgttgaatattggcccccactctcttctggcttgtagagtttctgccgagagattagcttttagtctgatgggcttccctttctgggtaacctgacctttctctctggctgccctgaacattttttcctgcatttcaactttggtgaatctgccaattatgtgtcttggagttgctcttctcgaggagtatctttatggcgttttctgtatttcctgaatttgaatgttggcctgccttgctagattggggaagttcacctggataatatcctgcagagtgttttccaacttggttccattctccccgtcactttcaggtacaccaatcagacgtagatttggtcttttcacatagtcccatatttcttggaggctttgttcatttctttttattcttttttctctaaacttctcttctcgcttcatttcattcatcttccatcactgataccctttcttccagttgatctcatcggctactgaggcttctgcatttgtcacgtaattctcgtgccttggttttcagctccatcaggtcctttaaggacttctctgcattggttattctagttatacattcatctaattttttttcaaagtttttaacttctttgccattggctcaaacttcctcctgtagctcggattagtttgatcgtctgaagccttcttctctcaagtcatcaaagtcattctccatccatctttgttccattgctggtgaggagctgctttcctttggaggaggagaggcactctgatttttagagtttccagtttttctgctgttttttccccatcttggtggttttatctacctttggtctttgatgatggtgacgtacagatgggtttttggtgtggatgtccttcctgttcattagttttccttctaacagacaggaccctcagctgcaggtccattggagtttgctagacgtccactccagaccctgtttgcctgggtatcagcagcggtggctgaagaacagcggatattggtgaaccgcaaatgctgctgcctgatcgttcctctggaagttttgtctcagaggagtacccagccgtgtgaggtgtcagtccacccctgctggggggtgcctcccagttaggctactcaggggtcagggacccacttgaggaggcagtctgcctgttctcagatctcaagctgcgtgctgggagaaccactactttcttcaaagctgtcagacaggtacatttaagtctgcagaggttactgctgtctttttgtttgtctgtgccctgccctcagagagggagcctacagaggcaggcaggcctccttgagctgtggttggctccacccagttcgagcttcctggccgctttatttacctaatcaagtctcagcaatggtgggcgcccctcccccagcctcgctgccgccttgcagttcaatcttagactgctgtgctagcaatgagcgagactccatgggcataggaccctccgagccaggtgcgggatataatctcctggtgtgccattttttaagcccattgggaaagtgcagtattagggtgggagtgacctgattttccaggtgccgtctgtcacccctttctttgactaggaaagggaattccctgacctcttgcgcttcccaggtgaggcgatgcctcgccctgctttggctcgcactcggtgtgctgcacccactgtcctgcacccactgtctggcacaccccagtgagatgaacccggtacctcaattggtaatgcagaaatcacccgtcttctgtgtcacttatgctaggagctgtagactggagctattcctatttggccatcttggctcctcccccagatcacacacttgtgattcttgctggcattcacacttactctctctttattttttgagacagggtctcactttgtcatccaggctggagtgcagtggtgccatctcagctcactgcagcctccacctctggagctcaagggattcgagtagctaggactacaggcgtgtacctccacccctggctaatttttgtattttttgtagagctggggttttgccatgttgcccaggctgatctccaacacctgggatcaagcagtctgcccaccttggcctcccaaagtgctgaaattacaggtatgagcctccatggctgggcacttactgtctttttaattatcagcttgcaaatgagaaatctgcccaaggagcctgagcttggtgaatacaagttcatttcagccccattggtgagtttatgattctatgagactttaaagatgtattttatttggacatgttaaaaaaaaaaaaaaagaaccgtgtgtttcttcacaacatccaaaataattattttattggtattgataattattattgaggaatagggaagtcatgtatgttatcaaccacttcctaaatgatacctagttaacacgttaggggagggaatcgaatctgaaagtgatacccatttagtgaagccaagcaatgtagcaagagttgagaaaaacttataaagggacctcttagcccatgtccataacattgtcgttaacataaagataggttgccagagaaagggtaactgtatggtcaatttagccaggtctgaactctcaaaaatcaagcactctcattctgttagggtgaagtcagagaaaagaaccttcacaaggtttgaaaacacagttgtaacatactgggctgtgttccagggctagcatttgactctgatttttatcttgtgcttagaaccagcctactgttgtctctgtgcagagagagtactaagtaggtactgaataatacttgctgtccagcacatagctctgtgcagaacgagcactaagtaggtacttaataatgcttgctggccagcacatggatggatcatgtttataagtgtgtatcataaacactttgccttgaggaaattgttttctttttagagttttcatactgtggacatccttaaaaagcccagaaaatgtatctttatggattgacatgtgacttcttacatatgaagttagaagccaatgaaatgctgttctttggactgaactttcaagactcatgtgtgtggtgtctaattcattaactaaaaatatgattcatatttaccttatgtaggactacaggtatccacatatccaccattaggatattctttaaatctggtagtttggaagatttccagacattgtaaagagtaaatgcatcagaaataagcattttccagaagagggaggtatgaaattgtaatgattagcctgttgcttagtcctggaaatgtgaaatcagataaaaatgaaaaagatgctttccttgcattctcttccagaaatatgcagcctgctgctcttttgtcttcagtgtgaccatgctgccctgaggagagcccagaactgtttttaaattcaaaaggacagctgctttctgctcactcaggtccactgaggcatgctccaagacaggaaaaaggtgcttagcggggctctttgatagagattcaatatatgaattttactttgagaataaaaagctcacccacttttaaaaggttaatcaaaagctcattgtagtgtattcttcctttcctatgcagtttcctatggaaatggaatcagtttaaattctggcctcagaacagcaatatttttcacagaggcagtccttctgccaagtggctctagaagtacccgtaatatccatgtcaggagtatgaaaaatgaaagggatgaacacttccttcagaaattatacctttgattcctttactttacggccaggcaggaagaatcctgagagaggtctttactgaaagttcagtatttatgaactacatactgaaaaatgaaaaacgattcctagcactgagttgcttaccctgtcaagtttacccattattttcaggctgttgagcattgtttgaaaaatcgatctgagagctaaatgagactctgtcccttaccatggtcttgctgttataaattcacactgggctatttccattccctaagtttgctttgccctttcctaccctttacctctatggtcttccatccggtaaattttctctcacccttcctggtctagctctatttcatcttcacttatgaaggcttccttgttttccttttttagaattaattgctaattcctcactgctctctaagcattaatacccccatcatagccttcatcataatatgttttgtgctgtagttatttatgtacttacttgtttttcccccttctttgctctttgattaaatgcatgccagatccaactttacagatgagaaaaatgagctctgaagttcaataacttgcccaaggctacccagttagaagagttatggacttcactctgaatatggtgacttttgttctagtgtgttgccttctctagtcttcttaagaaaaaccttgtcttcttttcttttttccttaggttgacttattctatacattagaagtttctaaattttaatcaaactgtcattccagggtcatagtcagccacatgtaaatcagaatgcagttttacatagattcattattactgtgcatggagattagaagccagctcacaagaagacttaatttggaaagatatgtaaccaacttcacgtaagtgctagcctttcattgatttctcacctccattctatattcctcctggcacttgttttaaatctgttctactgaagtccatactctacccccttgctctcagccgatgatctgtttacctgctctgagaagatttagatcagtagttctcaaactttaatatgtataaaaatcacatgcagagctctttctaacatagtttcccgggacttttcccaggaattctgatttcagcaggtcagggtggggctcatgaatgctccattctaacaagctcccaggtgatggcaacacagctggtctgaggactacactttgagaacctctgatttaggccatcctctgcaataggatgtcttctccaatacatcttctctggatatttatccttcctctccttctatgagaattcagtcgttctattctcaggctgaaccctctcaccacgagcttttatcccatctcatttcatctatttcaggaccttgcttcaacttggctctctttgaatcttttatatcaccctctcaattgctttttattctctactgctttactaataaaactgttcctttctcagttgtactatttaagatacatctaatgattgtaagcaaaattattttctctaagaatggtcgacaatttcagattcaactcagctggctaggaactaagtttctgtaatttgggaattggcttgtagagagcaaaattaagaaaccaagtttggccgggcacggtggcttacgcctgtaatcccagcactttgggagtccgaggcaggtggatcacgatgtcaggagatcgagaccatcctggctaacacggtgaaaccccgtctctactaaaaatacaaaaaattaaccgggcgtcgtggcgggcacctgtagtcccagctactcgggaggctgaggcaggagaatggtgtgaacccaggaggcggagcttgcagtgagcggagatcgcgccactgcactccagcctgggcgacagagcgagactccgtctcaaaaaaaaaaaaaaaaagaaaccaaatttaactttttttaatggatgtgagtggaagagactaatgagataacacaaaagagttaacttcttacatttctgtagtctaatacgagatagtttctccaggaattaacacagcacatctggttcactgacctgagtttgtttcctggtgaggcattgcagtatcatccatatctcaggcaaaggtactccagcattttgtagttaagcagttggaggaggagtagggagaactgctgtactttgaaacatttcacagtggactactttgcattctaatgatgttctccttacttaaggactttgttatgtaaggatactttgtccttctgataatcacttacacttttcttctgtgttcatgtcacttcattaatcctgattacttgtaatgaatcataatcttacccacttattcttgtgtgactcattcctacttgtattcttaatagtattttctatgtctgataacacattgtcaattgactatgctatttttaacgtaagcgttggcaaaaaggtttacttagagaaaagctctacatttaattccccggtgcctcagttcccaaatttgctaataaagattatacttagctgtcactccacgtttcatcagtaggattaaaatgaatagagatcatgaaataagacaatgaaaaaagataattataatggaccagattgagaaatccctacaaatcaacagaagcgacctgccatgtcagattcctagatgcagtttatttactcagtgggccatatttcttccttattctttctttttccatgatgccttccaaaactatattttaaccaggagggaaataccatttgtcttctgatataggaagatcctactgagagattatattcatatatttcgtccatcggcctgtaggtggaattgtatttaaaatactaataaaggttattattgcttatatatctaaaaatgctccaactgtccaaacaaagcttatactgttgatgatatttatcagtggctctgaacacttgcatatcataaaattctccctcaaaatttaaccttaaactctttcaggcttgtcttggtcacagtgggaactgaggacagctgctcatgttttttgatagaacagctcttaacatgcttttgctcttgcctcccactgcccaacaccagctgcatacacacagtctacttgctgtgtgcatgctctggctcctgtctccttttccttcagcctagttagcctggttttgtttggtttcatcatacaatgtatctattagtaaaacttttatgaactctgattatagtactaaactcataataaagtaatcagaacttcatttattaaaacactgtcttgagcttattttttaatttagtacacatgacaatttggtaaggtaggaattttcattccccttttatagatgggaaaactgaggtccaggatataggtaacattttcaaagttaactcgtaagtaaatggcttagctggaatttgaacccaggtttctgcaattctaaagcccatccttttaactgctatgctatgcgcacaattactgtattcttatttgctctctgaaatacaacaccttattctcatttcatctgctctttctgccctgtacacttcagtttctgctctatagatacctgctcgtattgtgacatctcaattttttttgtaccttggcagggttttgattgatgtattggtgttctgaactctttagcatatgtattaatagggaagacctaccaaatatttcatgtaatagggattattttgtctacctattttatctttctttataatgtaagtttgtagagggcagaaactataaattgctcagttagggactccacattgagccaagcacatacatacttgacccagagaagtcatcaccatctttatcgccacagctaacatatgggtagtgctcaccatctaccaaacatgtgcatggattattttatttactcttcacaataaccctataaagtagactatgttgccatccccaaggttaaaaaactagcccaagttcatcgagttactgcatgatagagtttgagtctaaccaacaccaatctacacgtctgtcaacacagttaactatcccacacttctcagtggaatctagagttccacttatttcctattccttccattcttcactatatgtcctctttgccttcttatcctgtttctctacttctcactttctgccctatacgtatctgctcaatcttcaatcttctctgccttaccctctctttttcaattttgttctcgttctgtcctatcctgcctccccactcttcttacctcattttcctagtcctcttttcttctttttttcacctttttacctcttacatatttcttttttaaaagtaacttcaagcttgataatagattcttcaacgctcttagcaatatcgtatcctaaccataataaaatgatagtgtgctaggtgtaaacagaagtagaatatgaaattgaaatgaagaatctctttactttttctattagaaacataaataatgagtgactgtaacatcttggtctccataatttctaagtgttaaataaaacacatttctttttttatttaacacacacacatccacacacacataaacttgttttatgcattgattgccatttattgagcagcatatttttggaaatgcaacaactacaaaagaatttttaagttattatcatacagtgacattaataggctcatcactttgccttctttccttgttctatcatgtagagggttgctttagagatcattgtgtattgatatgaattatcattgaagttttattagtctggatgtctcatcttgggcattttgataaatttcttttgctccaaatccagaagttatggccattcatctttataaataagactttttaaaaaaggtaaagtcataaaataaatatttcaaagcagtgttggatatagccagctgaataaactgccctttctagttaactttgaactctaaaccttatttaaatatcctccctttttttctgtaaagaagacgagaaaaaaaaacaatttcagtagattctaaaagaaaatatagcaagaacattttcataagagatatctcacataaaaagctgtaaaaattgggcaagtatttgcacctaaccagtagaacttagaagagaaaacatgaaatgaacttcttagcttatggaatggtgtggataggtttgcattacttagatgttcacagagctctagcatttacttactgaaacactggaatggttcatatccctgtggtttccaccttatttcttccagaaggattaggttttatgctgccagagaccacattgactcttagtaatgggatcactaaattctggttcacaattttgtgcatagagagattgcactaatatctcaaaattgtagctatgattataaccctggcatagaaatctgagctatgctggcagtgtcatgctgtacaatcgaatccacctgattatctctgcatttgtgacagctgggctggccttcattggcatatgcctctttgctgtgcccagggctttgaatgcaaaatgaaagatcagcatgatattaggggcccatgatccatagatggagcttcacaagtgaacagcgtctcagctttaacatggcccccagtatcctgctttatctttctggactgaagttcctatgacagatttgttgctttaaaaaagtaattttgcagatttgtccttttttaaaagaaataaagattgccttccatttcctactgaaagtgatatggtagtatccatcttataattgcacagattcaaaaataagccacaagtatgtgtgctgaagtataactgtggactataaaatacagatatcatagcctataatatggagggtagtgtgatgttataaagccatttttctgtgttttacattatcataaaatttaactactgaagggaaagtgaaggttttaatatttaactaagcctagcacttgaagagaaacacatatattttacttggaaaaaaaggaagttccattttggacactgcaaatgacagtgccagctgttgtcataatatttctaacatccgctgaggattaattccaggcccagcaaattcactggatgagcagaaacagccaaagaagtaaacactggagcttatgctgtgatattattaaattaggcatgagacttctacagagttggatatgtagtgaacactggattatcatgcctgaggatcgtttgctttgtgtatatctgcagaaaattgaatcctgaacttgctttcttctgcctcttggccctcttcctctgtagaggtatactcagaaaatgtgatctcatttgaatataaacttttctattaatattcattaagtactcatacaatataagctgaggaaacaaagtggtgggtgtaaaacacaggcctcatgtaaagagcttactttcactacagaggcaatgtagcataatgaagcagagatgggtttcagaggcaggtagaccagaattcaaatcctacttctcctaagtatggccttgggcccatcacttaaatttctgagactcagtttccttttctatgaaaggtagatactaatcatgctacagagttctattaagaattagaaatatttaaagatacttagaccactacaaggtagctatttttctagaacaggcataccttattgtatacattctatgtttctagaacaggcataccttattgtatacattctatgaaacagaatatggaaagtgctaaatgaaaggcacaatcagagaattccccaggccctcaagaaggaaggcggaatggatgaggaagtctgctgtccaaggggtgggccagagctaaggcaagatttgtgggtgggccttcactaaccaggcacagggagagggcattccaggagcagatgtagatctggccaaggaattaagacaggaatgcaagtggcgttttccaggcaaaagattaggaagttttagatcagcctggatatggagaccttgaatagcaagccgactgaggaatgcatgaaagaatgactactagctggaataagagataaatctcaaggcctcttttctctttcacctctcctcttgcccacatcatggacagatagttctggcttttccttatactctgtttctgtaagcaattttaagaaggcagagtgcataatggtattacttttatgtctgcgtgtgtattgccaccatgaagcctatagttttgcttttcaaactactagattgtgaccttgtaatgatctggcaaaaggctgaatttttaaaagcagtaaatccatatagtggataatattgggaaaaaattagggctaatactgaggaatgagaagattaggaaagagataaataaaatatgggtggtataaataaaaattaaagtgaaaatgtggggaaaggactgcttatgattcaccttacaaaatttctaccttatggggtctgttttcactgtcagttctttctgtgaatgcatgttcatgaagatactgaaggctgtttttctataggcagctggtggttttctgctgtaggcagaagtggttgaggtaatcctagggaggtgatgctgaatggggctgtggttctactttatgtaaggttattatatgtgaaagaaagagtaatttttaaaagtaattaactagtggtagattctgaactaacattagcaaaggttgattataaatcagattttatttttactactgatttagaaaaaatctttggagaaatagatttggaatggttaaatatcactttagggagcacattttggtatcacagcttaaaggtactcttaagagaaagctttacaaatggggcaacctgaaaagacacatttcatgtgcattcaaattcaagataagacccaaagctctgttgccaaggtaaaggttttgagagttaaatgggaatttggaaaataatatgcaaaaattgacttaaaatgtagataagcctacaagtatttacagggtggagacatcagagaatgtaagaaatagtttggatcactaacaggaatgtgtaatgggaagtcaaaatctatgctgtcaggaaaaattcatattattggatagaaactgtattatttggtacatttaagataaaatgaaaattgtgttttcaaagggttacgcctcgcagtggatgagtgattggggcgttttctggtttcagtgattctgtaggcagaaaacagtttttactgccaagtgtgtcagtggaggtggggagacagagaccttgctgtgttaagtgaaatctgttgcttaagaataaagctgggatttctgtagaatggagaaggagtttggtattatcatattatcaaaaataactgctctttgaaaagtagattttttaaagtttgattatcaagtatttatttaaaatactgcctaagtatttaaacactttcaggctctgattttgttttttttacaaaggaaacctatgcctaaaaattattttaagtagttatatggatacatgagctacacagtttcagacctgtgtatatgactttctaagaggtctatggtatccaataataaatgattttatgcagggatttaacacataatgggtcatgcattatctataccttgttaatgggatctatatagagtgatagcagaaaagaaagttaattttaggatcctttaatgcctataaatttagagcaaaagaaatatttctaaaagttcaacttttgtatacatatgcccaatcacaagttttacagacatttttacacgtttaggcctgaaatatttgattccgctcttatttgtcaagatacaatataattacattagtaaaatgcaaacagggcagataagttttccttctttttcctatgctatagtcatgctgcaaaccctccattacagttttttggctgaggtaggtctagatgtctagaggccaactaatacagttttatataatcaacatagggaagtcatttcagagactggcattgagctcttggagggaagaaaatgaaccttaaagcttcttgggaatatccctcactgcagcagagtttatgtgctctaatggatgctccgtaaatgcttgagagaatataagtcccataggttagcatatacttaattctacctatcatggaaacctctccatacattctatagctgaaatattttaggagctcaaaaggagtaacagaaactaaagggaacaccagctccaagattggatttttaggctttctttctagtgtaacacttcccttcctgttgggccatcggcaaccatatcctggctaattagaagtgattttcaggggaaaggaagaggtcataagttcttgcctccctattttccttcttgttgggtgctagtaacttaccttaagaagtaatgaagtcctagtaaaactcctaatattcagaaaccaactctcattattcaaacatgttgaggaaaaaatgtctccttgcgtcctcttctgcttaaaactcccccagtaccatcaagcatggacggatatatgatagtggcagtatccagaagacacaccatctatgtaacaaaccctggaaataaagtatggtataatcctaagcattcgctcagcactcttgcttctgggaatttgctatgagtcagccacaggcatctctgtgtaccttcaagcccagattagcacgtatgggaggataagagagaaagtgtacttcctgaatacatcttgggtagagtaaactaatccttagctaggttgatgacatccttacccagaatttaaaagttcagtagagactcttcttgaaatgttgaatttttatttctgcttgttgccctctatagatgagtgaaatgcaatgaagatattcatggctactataaaaatgcattagttctttttggtgagctacttgactatcagagccaaatatgtaggtagttggaattaaatttccaatttagcatcccccttagaagggtgatggaagctcccatatcttggtatttctctttctgagtatctgctgtctcactgaggcaacatgctagcctccatgttgtattatttcacaggtatagaactaagtgacacattgccaattcccacgccccccccccattttctttgatggaggtagattacatttataaggtgtagatattgcttgaaggtacttgttctttcttataagtaagcaagaaagagagcagcaaataatagctaggaggaagatgtgcccacaccacattcaggccacttagtctatctagtaagatagagtgtttcaggcatcaagcatgtactgggagacatgcatacagaaaaagaacaagcaatagactcctttgagagtgacatggtaggtctgaagagtgaatgtaactttttgtctccatcccctcagtgattcattaattattcattagctgtttttttccaccaggattacaatcattttacctttgcttgccagcctagtgggttattaacagtggttactctatttatttacacattttccttgtgtatgttattcatcctgtattagttcacccccacccctagtcaccattcttttttcttttgtttggcctttcatggctaccatattaccatgtgatcagaaaaaaaatgcactggtgtcagaattaggccaacacagacatatgggatggtaggttcatttgggttggatagagagctgtttgaaacttgtatacacatttttcaatttcaagaagaaacatctgcagtaaaggaagaactgcatagtttgcagtggtctaatggaggtgaactcaggaatctcagatgcatttagctctacaagtctccattatacaaatgatgttgaatgtttcatctcttgctacagattagttttgggccatcatgaaaaactttcctgaagattaagtcaaacttatctatgcatgccttctttggatacatagatccacctttgacagctactctgtccactaattctgtcaagtaggactgagctttcttgaacacctctccttttgttaacaagaaggagaagaagaaaattaaacactcctggcatctgcctggctgtgatttagcccttggtaaaaagtattacaaattgagacggtgccagactgctcctgtgattcatctcttctcctgtcaagaccagttgaggcgatgcaattgggaacctctctagtttgtgaagagacactttatgttggaagcaacagcataagcacaatagtacttaggcattcaaagcagagagaattggttcctcctgattgggtgaacaatcactgcaaattaaggtcaaaagtattgtcaaccaattcagtgtactaggcttcttcatcatttcccatgacttgttctctcttaggagaaggtttagcaaattggagcaatttttttttttaaatcttggtgcagcgttagtgataaaacacaagaaagtttaaggctggatatagcatgtgcatctatatcaagatgaagatccatagagagatgtgcttgatcttgggatgctggatgaaaatccaggcactgtgttgtgggagcctgatttctgaaagttggggcatcattgtttggcttatgacgtttataagtgtcaggtacgtcttgtcccacagaatacttgttatagctgttaaaggacagattgtcttcaagacaactggtacccatgccagagtagggtatattctgacagaaaatccatttactctcatctgtaatttatccccttagttgaaacatgatcccagtgtagggcatttacttttcacactccgtttaaatcagtgtggtttcttcctaccttaatgaattttacctcatttctttgtcttgcaaaaacccagggcagaatggtaaaatttcaaaacaaatctttcacaaggctggaactagacactctgttgggtcacatgcaagttatttgcagaagaggaacactttgcatgtgaataagagaaagcaaagcacttacaccagtattcagtgctcttggggccaggagtgaggggccttccatgtttgcaggacatctgtttgggccttaagttctgctacagccccaagtccttatctcatatctgcctggtgtcctatttttctgcttaaagagtcaaagactgaaattcttatccttgtttcccattcattcctaagttactttagccttcacatggagccaccatgctgtggcccacagagtgtgctattcacttaaacttatttatcttaacctttttgtgaaatatggttgcattctttgactttccttgcttgtcacagtttacattaatcctggaacttttgagtcttaagcgctacatgatagtactctttctaatggtttctaatgttacacgaatgcctctctttcccatttcatccctttctctctgttggttttgactttaagctctctggctgtttcatggcaatgattattggtgacagtattatctattaccaagtgtttcttgttcagttttgcatagtttcaatgtccttttaagcaaggattgccaaactacaggccacctgtttttggagatgccatttaattggaacactgccatacccattcatttacatatcacctatggctcctttctcactacaagggcattgtttagtagttgaaacacagaccttatgtaccttcacctcaaaacctagaatatttactatctgactctttacagaaaaagtttgctgatctctactttgaagaagagaaagtcgtcagatacatacaatgccaaagaactgctggctatgaaagggatattgtagaattctgcaattttcttaaagaatggaaaacattggaaaagagtcacctgtttacaggtgatttgcatttctataggtatcagaataatgtgggtgcttgtaggttggggaaggaatggcaggccttctctctctgtcagtatcttcaggccctgaagtcatacaatcaatggattgcttttcctcttcacttttccattttgccataattttgccaagggggaggttggaagtgggttaatattttgcgttagaagagcatttggatacatcctgataattactttatctcagatattcttagattctctctagtgaaggccacaccttctctgtgcctcaggctggcatggcccaactgtgctacttaccttgggttcctgctgctcagcttaaagggaatctctttcatatgcctagagccttgtttactcagttcaggtctgtaccagttgacaccaagtcaaaaagcactttagacagaagcctgctttgaaagtgctagctagcagcaaataagtctggcttaattctcccttgagtctggagatctgattggaagggtaaaagggagaaagggatgatttatttgttgactggattgactactttatattagtaattatgaggcaattctacccacattatctcatttaactccccataaaaaccctacaagggaggtaatatactttggaaaactgagactcagagaaattaagtaaattgcaaagtccccatgctataagcattatagtctcataagcaaatgtcatgagcttcttctagctttttcttcatgctcacaaaatggttgaaggagatccaagcatcatgtttctagttaaaaagaaggtgcagagtaaaaggcaaaaggcaaacggacaagccaaccaagtttgttctctttcctagatgttctacttggtgacttcagcttatatctcattaatgtgcatcataggattatctctgcaagggaacctggaaaatatagaaatttgtttgtgttaagctgggcaccttgccacctccataaaaatgtgctctataggtacagagcaggagataatcattattaataggcaacttatagtctctgtttcaagaggtcattctggtacctgagaaaattgacaatctctggtctaaactcttacaggcctctcttgccttcatttaagatgaacttgatagaataaagattattgttgttctctaatctcctgggtatgagacagagaggtaacagatggaatgatttctttctggcttccatagcaaaccaaagcatgtgccagtgaagagtggcaactgctacaaatacttagccaaacgtggggaagagtgttgatgctgtaagtctcctagctatgtcgaggcagcaggtgtctctgtagatcagggcagcaatccctttggtaagggcatgaagagggcacttgggactactggattgcatcatcttggcagagaaaaatgtagcatatactggaactctagctgggtagggaattgacaagttgaaccacaagttgactactgttcagtcagcactagcttttatcttccagtcaccattccctgtggctcttcattgatcgtccacaagctccaggcctgggtggtgcctgttgtgatataagaagggaagagtgatggtttccaaaatgtgaacactcatgtgtacagttttcatgttgataatgaaatgctagaaggggaacagctagctgatgcctatgtctttgtccatacctggctacccatgacaaagttgttgttgttgtggttgttgtttcactccaggcacaggcacagagccgcaagagtagaaaacaagaattccatcctgcaaaagaaaactgaatcccccttgcttggtcacttagggaatcaagttcaggagggctggacatgttttctgttgctctgtaataggggctgaaacttagttcaattatggtgcttagctgaagcaccatgactgaatctttttttgagaaggagaaaggagaagattttaaaatgaaatgccataagtgtaacatagtacatatagaggtcacaaacttggaaagcctgtggtgtcttggaaggtcacataaatgtgtgaaacacgccagttgcacacaggcaagcatatgtcccttctagagaaattattgccactgaggaatgctggttctaatctccaccctcccttcccctcccctccactcctgtaaaaaccagaggtttggaattttgcgtgaataactcagtttgttagtgttgacaaccaggcatgacagtagctcatttggaccctttgtccaaatcaggaaacagcagcccttccttcatggcagccctgtagctacgccagtcgagtgtgggctggatttcagcccttactctcctccttagctgagactttgtgccagacacaagctgcccagctgtagacagtgggcccagaagttatcagtgttacatgagcaaaacaaaacatatctacgggccatactcagcccatggattattattttgcagcttctgtagctgcggttaaaacaaagctctggggccagatcacctgggtttaaatctgggttctgcccttcaggcaaatgactcagtatttcttggcctcagcctcctctatctgtaaaatgaagataaatacttgtacttacttaacagggttgttacgaggataaaatcaatactgtggggcaaacacttagctctacagagggtgacacatagcacttaatgttatataataccaaaatcatgtgaaaatctgattttttcacacttagagaatatacagcatataaaatgatgggagagtgcatgtcagaccttcatgattattttctgcttcttggggaaatgcttatgcctctttggtcactgtgaagacagagaactcaaaatagtaagcatcacttactagctggcctactaaggccacaagaacaaatgaagtaaacactctgcttgaaccactgattttgtttgcctgcatgaaacacttgcacaggttgacagctgacatccgtaacaatgacatcctaaaaccattaagaaatgattaaattaagttcagtattatctgttgcaaaagacaaagatgtgtgaggtacgttttagaataacttacaatgaaaacaactaaaaagtgaggaagtttaaagtggtgagtattcaattgcttgagttcatcttctacactggctcattatctggaagctgggccacagagttaatactccatctttaaagactgtcacaggtgtttgcacctaagatgcatcaggttctgcagtaaaaatttggttcctggcactgagacaatgctaggaggagggtgttaacttagtactgaccataatgaaatctgtggttgactgcaaggacctgggttgaaataagactaaatccagtagtattgctccggtaggttcaatcatattcaagtgttcaataatgattataaagaagtgtcaagctgtcatgcttactttaaaacatatccagaaaagagaatccaaggaagtgtatttagttctacctgcatttaaattagcttttttttttatcattacatcaatgtcattaggccctaaatgatattaagagtgtctatgagaccccaaagacaaagattgtcccctaaacttctattcttatttgtttaacatggacttggcccagctacctccaatctaaagcttctttctctagagtaaggtatctcaatctatgcactgttgacattttgggccagataattctttgttcttggggctaccctgtgcattttaggatgtttagcagcatctctggtctctacccactagatgctagtgacttccttcccctcaactcatgacaaccaaaaatatctgtatacattgctgtaatgtcacctggggagaaaatcttcctggtgagaaacactactctagactaagaaaagtagccagatttttaaacacaaaagtgtttttcctcccagaggcaaaaagtgccctagagatggaagaattttgaaaataagctcttccacaaactatactgccaaaatggttagagaaagatcctataatcaccatgcttgacaaatggtgtttttgctaagcctcacagcagctttgttcatgtattgtgttaattgcaattaaataaactagtctagaagtgcgggtcatcatccagcccattcatatccctcctttacagtacacatccagacttctttcagagttttgcttgcccattggtgctcacatataaaaactccgtgggtgggagttagggattcatagagcagagagggacctcagctcttcatgtccacttttcttgttttaaaggacaaggcactgaggtccagaaagtggaatttgcagcacaaattgctatgataaacctcagtgattcagcccctgggatcttcaatgatataggcacagaacatataactattactgagtaaaatgtttaaaattatgttcttatggcaatgttcaaggttttaggcataagtaagacaaagcagagaaaaaataaaaaatatttttcaaattgaaggcttaaaaaattaaggataccctctatgtgccttctgctttaggatccagaatcttatgtttgtttgctctttataacacatgactgtgtaatatcagtcaattgtgactggtaaatttccattaatttgcctaatcatatttagaaattatgcctactaaataaattatggttggaacttgaaaggaataatggcttaaataagtgatttgttctttagtcagaaaaatattctcacgctctctctcataccctcatgaagcactgtcatctccatctagtttataattaaggcaatgggaccaaagtcatcctgttggcacaggatggccatctctgcatccaaatttcttttactaattggagaaaaccactaattgtacattttaaactcaaaatgtctttatgtatatatatatttaaaatatattttattatttttattaatttattaattataattatatttattaaaataataattatttttattaatttatacatatgtataatttatgttttctccatgtggctagctgttgatctaaaggagaaggagcaaggcaggaaaattatcaggttcagtgtttaactgggagatgaggacatcactaaaagaaaggtacagcaggttctactggtatgtacaagttttgattacaaggtgtactcttgccacctggtgtggtgtctcagctaactttagtttctgattaccggggtctctgagacaactctccagggtcaggtatagagctccttttgcccttggcatgttccaaatcgcttccttatgctcaaccttctgagcaatacaaggaaaaattccttgtattggcatgttatgaaggttattgaaatactttaggaaatgcctttgaccttgttttgtacttagaggatgatctcattcagaaatgggtagtgtcaaaatatggaatgtgctagtaaaataagcacacaattcacttaaagaaacaaaaacaagacaagacaaaacaaaacaaaacttgtttgggatgggtgaaaggcatggggctgcaattcatcctggattttaaggttagaagtggttgaaagaaatgtgatatttttacctaaaccgtggtcaactatacttttactttttagcaatgatgtgaatgaagaatggctttgaagactgttggtggatttgacaaatatttatcaagagcctgctatgagtgtcaccattataggtggtagagattccacaatgaacaaaacagagtcctttcttacattttgtgaagggagaccacctctaaacaaatatatatcatgtcaggtagagataagtgccatggggaaaaacaaaatagggtaaggggctaggtggggcaggatcagaccaaggaatttatattttatataagattgtcagggaatgcctctctaattagatgactttttttttaatagaactgaaggacataaaaggacgaggcttatggatatctgggggaagatgtcagaggctgttataaaagttgcaacaggaaactgattaggactcttagcagacttatatgtgcttagaatgaaagggattgggataaaagaaaagaggggagctttgggaaagcattaaactgtggccatagcactgattggataaaccataacattggattatgggtctgcaaatttcttacattttttttaaagtgtcagacccatagccctagtaataagcaacatggtcttttctttgagcatagctgtaatgaacatgttattcttttggagttatcctgcaaagcttatcaaactcaagaagcaatagtttatatgcattgcccaggttgaatattattaatttgggttgggaagtgatatgaccacattctgactgactataggccctagttcagtttacctgattttatgcccaatttttaatgagaagggagcttgctaggccaggcaggaagaaagaaatggggacagtgtcaagcaggaaatgcagaagagttgagtgtaggtaaatcccatctttcctggctttacgttgccttcacatccctcataatgatcttctacctcagtcttcagtataagcagtatgttgttctaaaggtatgaagtcttggccaggcaccgtggctcacgcctgtaatcccagcactttgggaggccgaggtgggtagatcacgaggtcaggagattgagatcatcctggccaacatgatgaaaccccatctctactaaaaatacaaaaattagctgggagtggtggtgcacacctgtagtcccagctactcgggaggctgaggcaggagaatcgcttgaacccaggaggcggaggttgcagtgagccgagatcgcaccactgcactccagcctgagaacggagcgagattccgtctcaaaataaaataaaataaaataaaagtaaaggtatgaagtcttttccaagctaaggcaagaatgctgaaacctcaatcatagcacttttccaaaagagtcttaccttatattctggatctcttcattatctcaagaggggcttctttctctttaaatgtgaaaagaagagaggcatcagctagccctattagcccagggctaagaattgctccagatttttgaatgcttaaccttaaacaaagtcacatgtaccagtggaaagtggctcccctgttttcaaggacaggtcagattttaactacgtgcctcttaggcttgccctgtcttcggagttgttaaacatgcatgttgggagctgttgactgtttttttttttttttctttctttctttttttgccttataatttacttttattttaaatctattatactttgaactgttgactgttagagaaagcagtactggcttaggatcagcagagaatatggttgaattctatttcttaaactgaggagaatttctgtttgagcccagtccaagtcattacttgagcaattttttgcgcattttgctgcttaagtgtttattttttttttgcttttacaagtaattttttttaaaaaagttatcatacactcagcaaacattttttgagcacgtacacaatgcccagccctgtgccatgcatgttcaaaaaaaaaaataggtaacattatatctgtgcttgtgaaattaatacatttgttagaaagataagacttcaatcagtaaagcaatccaagaaggaacaagtacaaatccaggaaggagacattagctcagtggaaagagtccactgaggtaggtagacttgggtttgagtcagaagcaagagattgcttttgtgagatttcgcttatcctgtgtgggcctcagcttcctgttatgtaaaatgggataatagtacctattacattgtcacattggattgctgtgatgacttgataatatttatatacaaagcaaccagtataatgcgtgctcatagtaagcacttattatattattattatttattggacatataattagaaggtctgggttataatcttgattctacaattatttagttttggtaagtcacttaactttatcataccattcatgcatattacctataaagtgaaaggaacagaggttctacaatttatctcccaaattccatggtattttgaaccaaaatgtattgaataagtatttgatgtttgcttccccttcttgttagtgatatttacaatagcaataaaacatcaatatttatttaggacttgctctggagccacgagccgtggtgtgttcttgacattatgttatttactccatgctgcatactcagtgagacagataaccttgtcttgtttcctagatcctaggccatattttatccagtttaatatttctgaaatcagaatgtattatgtagtattatgtagttaataaatatatttaatgtggaatttttttcccaaaagccctttctaagtgagatggaccctcttatgatttaatgaggatgtcttccaagggaaataaatattttttctatatttctgatggtaaagttgaagcatagagaggataatttacatgaccaagattaatgaactaacaaaagcaaattcaggacttgaacttaggtttgttttatttaacaatgctcaccctaccgtacttcttgggagcaaaaaatttaaaaagtttctaacatatattcattagttctttccattttttatagcaaaatatatttgatctgtctctagaatcaatgatagattcactatttgttaacttttaacaggaatatattttagtccctctagcctgactttataggctatgtacccagtacatgaaaatatatagtagcctcagtttaatgttgatgtttatttgatgtcgacatcactagtgacactggtcaagcgtatccttttagataagagcctattagaattatatattccctgtagaaatcttaccttgaccatagtacatttaacagcagatttttctcagactttcaaaatcctgaaagtctgggtcattacaagaaaacaaggatgtggtcataaacagttgattattaagcaaattcattgaaaattaacagcagtattctttgacctcactctttatagccaaactgctaatcttgggtaaattataagattatattactaatccattgacatttagcacaaattagctatcaaatgggtcagttgttactgttggaaacttatgaaaatacattaaagttcttcccatttcctgtatgtttctttctctgacacagaatcttagaggcttttattaggctgggagaacttcccaaataatctaatgactagttgaataattgtttatgatataaaatcagctttgttgtcagaatgattacagtttcagggtcatagttaatagaaaaatatttcagtgaaggttaccattagtcgttgtaagtatcccttgattcaagaagtgaaacttttattgaaaaaactatttgcagagctggagccctgatgggcctttctgaagtttttaaaattaagaaatcctatctctacttttaacaagacatgaatgttagtatattcacccagactaaatgaatgaatgaatgatcacattacacatgcttgggatttgatttccttcctctggtgttcactggactagcagcttcagtactcaagtgcgattgtaaaattacacatggtggaattcaaaatggtgtacatcagtcaggtcctggaaagacacacaatctaactcagaagtttcaagagacttcaaggggaaatgtacagaagtatgggtaggattaaagtagctagcaaggaatgctgagtcactcggaccctagctgccatgagaagctattatctcttctggacctggagctgcagaagaaggaaaccgtgttactctagtcctgagagggccggagccatggaggaggggtcttgtgacagaagctaaagttctggagagacataggctaggccagagcataggaatgtggggaagacatccctgacctctctgtcaaccttctaatctccattgttcaaacccagtaggaagttatccagcattgagcctggagagtcagcccgcagcagtcagcctcctgagtgcagagcagaggaagacctggaatggatatgctataggaggagggccaaacagagagtaactagtccagatgggaaatgctattttagacctcatacactgccaaaaaagaatggcatattcaaggaatccaggaccttgacctcatttgatcttggatttgcatccattttctgatactttcttccaaatactcttgtaagcatctgacagcagccaggagaattgctggtcagttcagcctgtcccagcttcattgctgaggtacatatgtggttaaggagctgagagaactggtctgatagctcaccaaagggggcctttcccaaggaaaataaaataaagagaaaattcattgagaatctgtccagaaaggacagtaagtaggcatggaatcatagtagtaaggaagcatggaggaggcaggtgcataaaaatgacttgtgatatttttgaagctatatgataatgttctgacccacactcttgccagcctctgcaatcttctggaggcttcatatgaaagcaggattggtatgctgtttattataaatagtgagacctgagagatgattactgtcagcataaatggatattacacattgcacctatctcccagcaggaagtttgtttgtttgtttgtttgttttagacggagtcttgctctgtcgcccaggctggagtgcagtggcacgatctcggctcactgcaagctgcgcctcccgagttcacgccattctcctgcctcagcctgccaagtagctaggactacaagcgcccgccaccacgcccggctaattttttgtattttttagtagagacggggtttcactgtgttggccaggatggtcttgatctcctgaccttgtgatccacccggctcggcctcccaaagtgctgggattacaggcgtgagccaccgcgcccaaccagaagtttgtgtttgatgtcactgttgtttcaccaatttaaaagaaaatgaatatttttaaaggaaaagaaaaaagttatcacactatgtgatgaaatttgtatctatgggtggttatttgctacttggtaaataattaaagcctgtactggttacctttcctttagcagctgacaacaaataaacatcctcacctcacaccttatacactttactccatggttcattttcagtattattttgtacttctcttgcttcatcatactattgcctggcaaaattccaacccagatttaatcctgctttccatctataccctgcctacacctgagagttcaatgttactgtggaaaatgcacactgtggtgacttgtttcactttaaatgcatgggccctaacctcactgagccatttattagtaatgattggcaactctccatatttcttgaatccactcactttcctagtctcctggacaactatgtgacaactcctctatcctcaagcctccaacaattacttctcataccctaactctgcgcagataaccttttttcctatttcactgcaaaaagcccagaagtaatcaaaagtgaatctacaagcttccaccaccacatctactcctcccagtctcagtgaccatatggtttgccttccttctgttaacagagagcttctatcaaagatgaacctctccacttggcactttatttccctcttgcatattcaaggacattagctcagcaattttctttctttctcctttcttgcattatttattttctccctccaccagaagttgtcaccccaacttctattagaatgacttaggaagtgcaggcctcaaaccttttttttttttttttacacgtctacctctattagcactccctgctcctattttaggaatccaggctttaacgctaacagttacaaattaagccacaagctttgtaagtatttgcctgtgctctagctgctagtgggtttttggaaaatcagtatctgatgggcatttgaatacatttgctcttgtggctttaaacaatgtctgtacaataaaaacttgagaatttatctcctctgaattctagacatttctattcaactacctagctggcatttccacttgcatgccttaaaggccctcaatcttatctgtactgaatcgatcacccccctaactgcctcatccgtcagttatccccattgcagttggtgacattccatcctttggttgcttgggttaaaaaatgttggagtcccccttgactcctttctttctctcatttcccaaagccaattctttggcaaatagtaaccatttatcacattttccactgctactgttctggtccaagccaccatcctcattcacttggattattgcaaagacctttacctgttctatatgcttttatatttgctcatttttctcccttcacccctattttgctttcagcacagtatatcatctcatgcatctactcaaagccttctaatgccttcccatttcatgatggcctataaagccctttgtgatctggttccctgaaatccttgacttcatttgggcagatgtttctgctataacgctatttatgtgttctgtaaaactttttggtctgcaagatgtactttgaaaaataacaggtcttatggtaaaattacgattggaatagaacactcatatcttatacaacataaaaaactgtagcaataaccaaagcaataatagataccttgggagataacaggaaggcaggcagctcagattgactgaaggcgactcaaggaatattaaaaatgcacaaaaacagtagcatggagatgccggctggggagctgagatgagacagatgaatggagctctgagccagagggcctaccacaaaagtggtcataggaagaagttcagcctgccttgagcagatagctttgcctggtgggagagggcgtatttcttgggagacacctctgggtgcaggcgctcatctttaattcccttaagagagctgaaatcactgcagtctgtgcagcagccaacttcagggatttttcctttcctgctaaggttataattctgttcttgctattcttactcctcttgcctaagaaaaatcttgtttccatgtaataccaatattatcccactatttaccagtagcatatgagctgcttgctgttacagaaacacatgctgtaatagaacagactgcactccttgggtcatctttgttatttcccatgtgtcaggtgagcacccaccttgtgacttttgctactggtctttccctgcctggaatgctttccctccagaagtcctcacggatttcttcttctatttcagttctttatttaaaaatatttttcatagtttgaacctctctaaccagctgatttaaaagaacaacaccaccccaacaacgttctctactttacatcatagtttaattttctccatagtatttatcatcatctgatatattataatactcatgtattggctgaaccacatccataagtattaagatccgtgagggcaagacttgtgggtttttaaacttgttttcctcctttgtttttctctattatatctttagtgtctggaataaggttcagcacatacaaggcatttactaaatgttgaatgaatgaatgaatgaagctcaagctccatctacaaacagtcctctgttttttgttttttgtttgtttgtttgttttttgtttttgttagctgttatctggctgttttttattagataataatttgtcttcctttacttactgattttgtttatgtgtttgcaggtgtgtgtgtgtgtgtttgtgtgaaagaggagaatgacttttatcaaacctggttttatgtcttccttaggatgcatcagagtttcatgctgttcacactacccttcggggtattcagacatttaaagtcttaatatttcagcaataaagtcttaatatttctggcctggaaaaatactgtgatatgggttgaattcatctttttgcacccctctatcatcataaccactccctgctcccattctaggaatccaagctcttatgctaacaattaaaaattaagtccacagactgcagatagaccctacgcttgagctgccggtgggttgctgaaaaattaatatttgatggaaatttgaattaattgcctctttaccccctaccaatccctgtgtatggtcaaaaaataggacattccaatactccacagtgatggccacagtgctggtttgtgctgatgttataaaggagcaggaagatggtaatgaactccctctggtgctggacaaggcttcacaagggtgctgatgaaaacaatgtgagaaaatggactcaggggttctcaaggcagagaatggtggggggatccaggaatccacatattcaaagacacaaagaagtacagatttctgaggtgttcagggaatggtgattcattaggtatggggctgggggtggggcacagggtaggcagaggagagagcagtaggtgtatatgccatgaagattttggaatcgatccaactatacagctatcaaaggtttttggtgatacaaccagattcgtcttctcactccttacctttctcacctgatccctccctggcttttccaaactgtcaactataaggctgtgtgaccagagagcatgcccctgtccccagtactcagataagtgcctgacatatatatatatacatagacaacctacttgtttatgtgtctgaacaaactatcaatattcatttctgcattttcttttcagcaatgcttacactgtcttcaaatcctttagggccctacacttgactatcaggctgcctattgaaaactaactttacaggttgttcattggttaccatgatggcacaagtaaccattcagtaactttttttttttttttaactagaattgaaagctttgatccattctctttttctggtctcatttcccttctaccagatctgattcatggtgcaacttttggtggcatcaccccttaatccagcaacatttttgtataccctgaggttattactttgatgtcctgaacttatggctctgggggatatttttttaaaggggtcagagaaataaggttgaattagagagattcttagaagtttatgattaaaacactatcccctctgatctgagtcccagctctgccattgacaggttgtgtatcattagcaatagcaagctacttcacatttctgaatctcagttgattgagcaaaatttagataatcaaagactactggagatgtgatgctttgacacaaagaaatctacctctttggtgaaatttcaattgtgtaggagcagttatttgggagaaaagtgccctctcaccttcttaaatcatctcctagggctataataggaaatacgcagcttttgctgagaacccaaatgacattgtggattatccagctctagtcttctctctcccatatagaggccggttatctttgtcacttcacagctcattagcagccccactcagggccatggagaggaaatagatgagatgaagcttaaatatgtcacattggttatttcttagcagctctgataaaaggcttagcaggggccaggcgcggtactgtacgtctgtaatcccagcactttgggaggccgaggtgggccgatcacctgaggagttccagcccagcctgaccaacatggagaaaccttgtcgctactgaaaatacaaaattagccaggcgtggtggtgcatgcctgtaatcccagctactcgggatgctgaggcaggagaatcgcttgaactcgggaggcggaggttgtggtgagccaagatcgcgccattgcactccagtctgggcaacaaaagcaaaactccgtctcaaaaaaaaaaagcttcagcagggtgaggttaaaactcaaataaagaggtctgaggattatctgtgatgttagctcatgtgtgttaccttcctgtcttcccttctttgttcttatttctagggattagttgactgcaaacattaatgggttaaatataaaaatgactgcaaacattaatgggttaaatataaaaaatcttttctatcctgaaggtctttgaaaaaatgattttattacttactggaaaagaaaaataaaacaaagcttgcttcacccagaatttattttttcttctagttaaaatgagcaacttctttaaccagaactgaccttgaagacaaatggctaaaataaaacatttgctgaattcactgggcgcatcttacaagtaatttttggattctgcattgactacctacaagtgccttctgggtgcaagtccacaggcaagatttgttctgcaaatcttccatgaccaaggtcacctctttggattggcagacccagggagtccatattgggaagataaattcacacttcaccccttgttgagatctccagccttgctcctctgataaccaggtctctcttctgtcctattataatttatgacctttgaaaagttacttatatctggggctattcaaactcccagctatctatgaccatatgcataaatggttctagatttaaaaaaaaaaagaagctattcagagatattgggataccctataaccaatataaatgggtaattcagcagaaccagatgctggggttgagaaatagatgtggacaattggggcagggcctaagaaagatcggaggcaaagacagtgactagatggggagctctgataaggtaatgcccaggcctgtgcttggaattctgccacagtggggacattagtgggggtctgtagtcattgcagggtgagaggaggatagaaagaaaagattgtgtgaaggtcagtggaaggtcccccatttcattgctaagagaactatgtatgcacgttttcctgtgtttagtctcacacataattgtacctttaagaactgatcacacactgcatttccctggcagtttttggcatctcagatgaggaagagtgatgggcgacaggtgatggtgacaactattaataagatctgaaagtaaacagtctcatgaaaggtggccaggagagggcagtcaccttttatcaggagcacagactgaatttgcaaagggtacttaagctacaagactataaagcatgatgcaggcttaaccaaaatgcagtgtcttgagcatagtagactcttagtgtatgtttgctaaatataccttagctgctgctgttccccagagctcatcagagttccatagaaacctggtcccttccagaaaaccaaagaatgactaaagaaaagtgattgcaaatccagaaagcagctttgccttactggttggtaacagcaggattttcttttccttgtagtttattttggcttaggctagtgtctctttcatgaagacagctactatttacaattgttgttaacatgtttttcctttttcatctcccaatatactctcttcctgtcgttaaacacagtcaatttaccaatggaatctgctttataagctcctgcattttctttttccacagatgggattaatgccattatgttctatgtcatccacatagtcttggcttctaggcaccaaggtgttgttctagaggaaagaagagtaatggtcgacacaggcaggctgagggctaacctaatgatttcatgcatttagtggtaattcttaattaagatcccaattttattctgttggatttagtctataacccgctgaaaatcattcttgaattaacactgggtggatataaaagcagaaagccaaggactttgcactgttctcagctgtagctgtttatttagctggagaaaatttagtgggtggtccaaccttcataaccaggaagaataaaatagaggtgtaaaggccttggtggaaggagggcagtagcaacctttccatttcttcagttttatcgcagcctatgaaattagttccttaggtatgttgatcttgtaggagctagtattttaacatttgctccatcaagttgtttggtttaaatctaagaataagcccactgaaaactattcctaatttgtgaaacgaataacaataatagatgttaatagaaacaaagacttcatttggttagtttttagagggggcacagagaatgtagtaacataataagttagatttttgttgttttctttttcttagttctttgtagtctttataatctctaattggcatttgctcctgacttttctcagtgtacttccacatggaagagacaaaagtctcaaagctggtgtagaaaaacccttaataaattgcccattaattagccaccttgatttccacctttaaagcagttaattgaagtaagaatttgttagatttttctcaagcatagcagaaattaagattaatttcttaggtgtcattgctacttgcctacttaaaccaccagttcatctttatcataaatacttaagccaaaagtcacattagaggcaatatggcacagtgattgtggaccccggagtcaggtgagctggttgaaatcctggcttggctacttcccagctatgtgatcctgggcttcagggttcccttttgcaacatgacatgattgctgagctgcttcttagggttgtgtgtggctccggtaagataatacaggaaaagagctgaaagcagtatctgaccctggagagaaagtagggaagagacaatagaggaaagaggacaaggaagtgggagatgaagagaaagttcaagaaggaaagtggaagaatctcaaatagaaagttaattttcagtttttcctgagaagagatatatagacatcttcatgtggctttggagagccttggagcccatcagcaagacggttggaaattatactgaaacagaagtgtagacctatgtgacttatgtcctggccagttgcctcatgtcctctgtggtcaggttgatctctactggcactgtcaaaagattttttatggacagctggttggggtaaactttgaaacctgattgtttgcacttgagtgccagagtgtgtaattatttaccggtgttcactaaggatgtcagtgtagatttttagggggagaaaaaacttaaatttaaaatttggaggcatctttttcagtctgcctgccctggtgtttgttataacacttagtttggcatgtaacagctgaagctactggttaaatcattaagcatttattattttaaaactcctcttctcaaagcaaaaaataactatcatgttgaagttctttcctctaagaatgacatttactgtgagttttataccaatggactaattggagggttgagaaaataaattttggaaagacaacaataacttcagaattttccttggatggaggtttcctttttaaaacctgaactgagctttatcaaaacagtaactgaactttgaaacgaaacaagagtgctgaattgaaagctccaggaaggcagggatgtgtctgtgttgtttatgactataacctctgggcctaaatcagtacctatcccatggtaggcactcggtaaatactgaaggaatgagtacagtatgaaaattagcatggctgatccttggaaaaaatataagtcaaaagggaatagcatgcatgtgtaactaaaacatcagtccacatgcttgaaatgtcatcacttttttatggtcaggacctgtttttttctgctccaattaaagaagaaaattgtaatgtgaaagaagcaagaagtgaagtatttggtattcatgtgttttgacatctgcagtaagtttaaaataaatttctaaatcttattgtattgaaattgtatgagtttcttaagtggtattattcattcagacttaaagtgaagttaggttgctgtcactcatagtggacttttttttttttggcattattaaaacaacatgtcttctgggtgttgtcttgtattacaaaagcttgcgtgttttctcttgatgctgtgccctgtctgttgccattgaggggtctaaggaccaaatgaggtcttgtttccttcctgatattcttttgaccagtttagaatatgccaggtccattcacacaactaagcggctcagttctctcagttccctggtcttctcatattagattgttatctatgagcttgaagtttagacatgaaaaagaatggttgtaatcctcttccttctctcaccctcttccctttttttcttaagttagccttttgaattcatgattctaataattaatatatattattatataatatagtatatattcataataatgattaatgatagtattaataattctgtgtgtgtgtgggcagctactcatacagaggaaaacagattgattagtggaaattacattaatttcataacttcttattaaaagagtttgtgtgtgtgttgttggttgtttgttccctttgcaactcaacatggtcttcttgaggtgtagggaaaacatatgcttaggaaacagagccttcttttctccttttggtatggaagacatatgcaaaaagaatgaaggaactaattgtctctagccagggctctgcaaaaatagtactggtagagaaaaagctctaaaagaagtaaaagtttatagtgctttctcctggcagagttaacctcatcttcatcagcttttcccctgcctcagagaggcagttttggaatgaccaaagcagagtgcccaacctctctgttcagagttagcgagcatttggatcactctctctctctgcctcagtatgagtggaatattgcatgaccatttctgatttctgccatgagcgcactcggcctagatgaataaatcctccttgaagaaggcggggcattttggcattcacaagaaaccatgttgatatctgatcctcccactggagaaatgtggcaaagtgagaaagactcactctttgggactccaaaaatgtaaacacaagtaagcatgcaagctgaagaagtcacttgaaatagaaaaaaaaagtgttaaactctctgttagtcatgtgactttttcttggtattcgagagccaggaggctcttgtggtctaatctggaaagagtcgctaatcgctgtgtcaccttggcaaattggttgatctccctgtgctggagtgtttagtccagctgctggatgggatgaaagcaagacctcactgaaaccagatgctgtctctctgaaaagatttcagcaataaataatatcgtatatactttgttcctggcagcaaatactgaactgctataaccctctgttttcacttgcttctaaatttctggaaatatctcctttgggcttgaatttttccatgcttgtcttcagcccaaaactttttggaaagtttgaccaaaatttcacttagctgtttttcctgaattatgggagaataagggcaatgcattgtttttcagctcataaattctcatttttcccattattcctcagaaaaatagctgctacatttaaagtgtttagaactagtaaaagaatcttggtatggtaaagaatactggcagaagacaaatttaagtctctcagtatttccttctaactttaaacatgactgcacacaatcagggcacacataaaaagctctgatgtagttttatagatggccaaagagaagattctgcaaattctctcagtaactcatcccaagttaccaagaggcaactttagctaccatcagttgttacctttctcaaccacttgctctgtctgtggatctgatttctaaaaaaatgtcatggttatatgttggcattgaccccttatctacattttaaataaagttgaccatttcttttaggtagccttcatgtgtgatgacctcagtcatatctgctgacctactagactcaaaattcctttacagcagggcctaggtctgtctacctcaccattgacactgtagtgctcagcagggtatgacacatgtagtaaaaactgattgttgaatgaattaaatgaacataagtacagttgtttttgctgcaatttgttcattgatttgtccactaagacatgcatgcatgtattcagtgagtatcactgagtctctactttatgccaggtattggtatgaatgttgtgaatatttctttgctttgatggataacacagaagttttgctgatacacaacaaaataattatattatttgagtacaattactatgcctatagttggaatattagtccaatatagctaaaggcaatcccagggaatttatcacttactgagcgtccatgatgtgcctggccctgtgttaggtactgagaagagatcaattagacagtttctgcaggaagtcacacataggttaacagtgccaagacaaatcctaaagtacctattatacaaggggaactataataaagagccaggtgagttgaaggcaggagaggtatcattgtaccacaagataccttgtgatcttgtgtaaatcccctgaacaatcaggaaaagctttatggcatagctttatggtcagagatctcatggggacaggcagttagttgcaatgccttttatagccacatccttcactccttaaccctgcactgtctgccattcattctctctgtgctttcagccttgagaagctggccaaatttctcaggactggaaaataaactggaatgacactcaggcacttgatatcaagattattagggtcatgattgtgtttaagaccctaagacctcttgatgcttttacaagaatgggtactttttttgtccctgttttcttcttttgccccaagtttcaagagcatgttacagcagcagtataagcatacacaatcaaaggtgattgaagtgaggacaactggctcaatgagctccagccacttcaactctcctcctagtccctgtccccttgcccggaatgcttcaccctcagactttgacatagcaggcttctttttgtcattcagatctcagctcaactgcaaggatttctctgacctgaagttacatatgtgtcaccccttctggtctccgttgctctctatcacatcacctattggactacctttatagcatttatctccacctgattgtgtccttttcactgtttttctttaaactttttattgtcaattttctttcactagatgccagttccatgaagtaggaaacctttaccactggtcttgagtgctcttgaaagtgtacgtgtgcaataggcactcaaaaatgtttatggaatgatcagctggatgcgtatatggcaagtggcgagaagccaagggaataggacaagagtcctattgtgctccttgcctgaagaaaacctcttgcaagaatcataggctgttcttgagggtgcctttgccttggattcgccaaaaattcttctgtttcttttgtgtgaaaattttcccctcatacacagcaatgggcactaagaatgcatatatccagacttttcaggttacaggatggcatctcagatatagtcttcctttgatctatatactatgaagccataattgcttagccagtatctttttcaggatttactccatatttcttattctaggcctttcaggtggcagctgcactggctttcagatataatttagaatttagtttcggatttgtaaagctactcatgctgcagatcttctctgaaacatttctgtcacattttagaaagctttacattttcatctgctaacgattttcatctgccaaagagcccatctacttaaaaagcagatcactgaagccacacttggcacatattactttggcttattttcttttgatttttttgctttgctgggattacttatttatgaagaaagagagaatattgacttcttattttagaagagaggatattacttgggttgagagttctagttatataaaatgtatttatctaagttgttaactatatcaaaaatggagcagtcaatctttggaaatagttcagggtgaaatgtttttagcatgttcacatattctctttgctgtttttaaataatttggcaaagcttatttgcatttcccaaattaacaattttggccaagaggaaaagctaaagtgttggtttttctcagctcaactttttgggtgtaattaatttataagcaagattttatgaagggagaacagataggacctttctacaaagtccctgagccaaaataaacaccccattgttccatcgttttgtattgcacataggaaaacatccatccctatcattattctgttaaagggacacagattaccagatttgtaattttaaaaaaggccatttgttgattgagccactttgcgtataaagggtggtatatgttgcctgccgaatttctgtacaagaaaaaaatcatatatcaaaaaaatttttctcattcatcatataagaaatttatgcattttagtatgtaccagaagaaatggctttggcattttctgtttttagcagtctgttgaaatttcttcattaaagacattttctgtttgaaggttaaaatgaccatataaatacagattaattcagttttaataggtgcatcttcctgtcatttaccactttctctcctcaatatcagctacagtgatcaacatatatttagcagtgaaactgatatattctgtttatcttcaaatcataagctttttgtttaaatacaaaggaaaatcttatacctctgattttaatatgacaaatcaaaaagtccacaccaaactcccaactcatcccaaaaaagagattgctatctactcatcactgttctctgcttctaagatttgtttcccttggggttactgtttgagcaacttttcttacttccaagattgtttttgtggttttaagaaagaatctgaattccaagattatttttctggttttaagaaagagtctgaaaatctagagattacttaccttgtggtgaggtggttgtctatgcttctgttcaacaaaggcctcatgtactgaatggaaaaaaagcatcaggacctataattttctaggcattatgcaagataatagaggagacaaaaatgatgtcttgcttcaaagtcttagatctatttccctttgggggttgaggaatgagaaagagatttttagatgaaaaacaggaagcccaatgaggacgtgtggcaatagttcctaaaatgagcaaagagataaatttactcttttatatgattacaaccaaatcacacactggtgagtttcaaaacagtagttttcatttagaaagcaaattaagtggaataattcaactgagtttcactgcaatgggattcattctagatggttcaactctggaattagaaacaatatctaaggatgttgctgatagtagtcagcagataaataccagtaagtcgtatacaggtatacatcattttattgtgatttgctttattgtgttttgtagataattgtgtttttacaaattgaaggtttgttgcaaccctgtaacgagcaagtcttctggctccatttttccaatgacttgtgctcattttgagtctctgtgttacatattggtaatccttgcaatgtttcaaacttttttattattattatatctgttttggtgatctgtgatgagtgacgtttgatgctattattatgttgttttggcacaccatgaattgcacccatataaggtggggaacttaatcactaaatgttgtgtgtgttctgactgcttcactgaatggctcttcccctatctctctccctctcctctggcttccctattccctgaaacacaacaatattgaaattaggagcgttaataatgctacaatgacctctacgtgtctgatatggtttggttgtgtccccaaccaaatctcaacttgaattgtatttcccagaatttccatgtgttatgggaggcacccagggggtggtaattgaatcatgggagccagtctttcccatgctattctcatgattgtgagtaagtctcactagatctgatgggtttatcaggggtttccacttttgcttcttcctcatttttctcttgccaccaccatgtaaaaagggccttttgcccccagccatgattctgaggcctcccaaggcatgtggaactgtaagtcccattaaagctatttttgttcccagtttctggtacgtctttatctgcagcatgaaaacaaactaatacagtaaattggtaccagtagagtggggtattgctgaaaagatacccaaaaatgtggaagtgactttggaactgggtaactggcagagtttggaagagtttggagggctcagaagaagacaggaaaatgtgggaaagtttggaacttcctagggacttattgaataactttgacccaacagcctgataacgatatggacaataaagtccaggctgaggtggtttcagatggagatgaggaacttgttgggaactggagaaaatatgactcttgttatgttttagcaaaaagactggcagcattttgccctagagattcatggaactttgaaagtgagagatgatttagggtaactggcagaagaaatttctaaacaacaaagcattcaagaggtgaatgcttgggtgccattaaaagcatttcattgtgaaagggaaacagagcataaaagttcagaaaatttgcagcatgacaatgcagtagaaaaggaaaacccattttttgaggagaaattcaagccggctgcagaaatttgcatgagtagcaaggagcctaatgttaatcccctagaccatggggaaaatgtctccaggccatgtcggagaccttcatggcagacctcccatcacagacccagaggcccaggaggaaaaattgtttttctgggccaggcccagggtccctgtgctgtatgcagcctaaggacttggtgctctatgtcccacctgctccagctgtggctgaaaagggccaacacagagctcaggctgtggcttcagagggtggaagccccaagccttggcagcttccatatggtattgagcctgtgggtgcacaaaagtcaagaactgaggtttgggaacctccgcctagatttcggaagatgtacggaaatgcctggatgcccaggcaaaagtttgctgcagagttggggccctcatggagaacctgtgctagggcagtgcagaaaggaaatgtggggtcagagcccccacacagagtccctgctggggcactgcctagtgaagctgtgagaagagggccactgtcctccagaccccagaatggtagatccaccaacagcttgcactgtgctgctggaaaagccgcagtcactcaatgccagcccatgaaagcagacaggagggagactgtactctgcaaagcctcagagtagagccgcccaagaccatgggaacccacctcttccatcagcgtgacctggatgtgagacatggagtcaaaggagatcatttttgagctttaaagtttgactgccctgcggcatttcagacttgcatggaccctgtaatcctaatcctattgttttgtccaatttcttccatttggaacagctgtatttacccaatacctgttgtatctaggaagtaactagcttgcttctgattttacaggcttataggcagaaaagatttgccttgtctaaggtaagactttggactgtggacttttgggttaatgctgaaatgaattaagactttgggggactgctgagaaggcattattggttttaaaatgtgaagacatgagatttggaggggccagggccagaatgatatggtttggctgtgtccccacccaaatctcaccttgaattgtatctcccagaattcccacaggttgtgggagggacccagggggaggtaattgaatcatgggggccagtctttcctgtgctgttctcatgatagtgcataagtctcctgagatctgaggggtttatcagaggtttctgctttcgcttcttcctcatttttctcttgccgccaccatgtaagaagagtcttttgcctcctgccatgatttggagggctcccatacatgtggaactgtaagtccaattaaacctctttttgtttccagtttcagatatgtctttatcagcagcatgaaaacaaactaatacagtgtccaagggaaaggaaaagtcacatgtctctcactttaaattaattaagcttagtgaggaaggcatgttgaaagccaatataggctaaaagctaggcctcttgcaccaaagagttatccaagttgtgaatgcaaaggaaaagttattgaaggaaattaaaagtctactccagtgaatacataagttattaaaaaaaaaaaagtgacacagccttagtgctgatatggagaaagtttgagtggtctggatagaaaatcaaaccagccacaacattttcttaagccaaagcctaatccagagcaaggccctgactctcttcagttttatgtaagctgagagagaaagctacagaagaaatgttggaagctagcagaggttggaaatttaagaagccatctgtgtaataacataaaagtacaagatgaaccagcaggtgctaatttagaaggtgcagaaagttatccagaagatatagctaagatcagtgatgaagattactaaacaacagattttcagtatagataaaatagccttctattggaagaatacgtcaatagaagatctaagactttcatagttagaaagaaaaagtcaatgctgggctttaagacttcaaaacttcaaagggaaggctgatcctttttttatgagttgatgaagttggtgactttaagttgaagccattctccccagccttgctagagaaaccaaaagtcaaattcaggaaatacagagaacccctgcaagattctacacaagaagatcataccccagacacataatcatcagattttccaaggtcaaaataaaagaaagaatgttaaaatcagctagagagcaagggcaggtcacctacaaaaggaaccccatcgggccaacaacagacctctcagctaaaaccctataagccagaagagattgggggcctatattcaacattcttaaagaaacaaatcttcaaccaagaatttcatatccagctgaactaagtttcctatgtgaaggagaaagaagattcagagaagcaaatgttgtgggagtttgttagtaccagacctcccttataagagatcttgaaaggagcactaaatatagaaaggaaagacagctaccatctaatactaaaacacacttaaatacacagaccagtgacactataaagcaaccacaaaagcaagccagcataaccagctaacaacacaatgacactatcaagttcacacatatcaatactaaccctgaatgtaaatgggctaaatgcctcacttaaaaggcacagagtggcaagctggataaaaaagaaagacccaatggtatcctgtcttcaatagacccatctcacatagcctcaaaataaaggggtggaggaaaatctaccaggcaaatggaaaacaggaaaaagcaggggttgcaatcctaatttcagacaaacagactttaaaccaacaaagatcaaaaaagacaaagaagggcattacataatggtaaacggttcaattcaacaagaagacctaactaccctaaatgtatatgtacccaacacaagagcactgtattcataaggcaaggtcttagatacctacaaagagacatagactccctcacaatattagtgggagacttcaacactccactgacagtattagatcatcaaggcagaaaattaacaaagacatttaggacctgaactcaacattggactaaatggatctgatagacctttacagaactctccacctaaaaataacaaaatatacattcttctcatcaccacgtggcacatactctaagattgatcacataattggaaacaaaacaatcctcagcaaatgcaaaagagctgaaatcatacaatttcaaaaatcagagggcccttaagaattatgctaaatctactctgtctatactctataaatggaacacaatacatgtgtaatagtacacctgtttacagtatggcttgctgaatattttaaggccacagttgagacctcctgcacagaaaaaaaagatttttttctaaatattagtcctcattgagaaagcacccagtgaccaaagggctctgatggagatgtacaaggaggttaatgtagttttcgtgcctgttaacacaatgtccattctgcagcctatgtatcaaggagtaattttggcctttaagtcttattatttaagaaatacatcttgtaaggctatagttgccatagatagtcattcttctgatggatctaagaaaaatacattaaaaaccttatggaaaggatttaccatcctagataccattaaaaacatttatgattcataggaggaggtcaaaatatcaaccttaacagcagtttagaagaagttgattccaattctcatagattactttgaattgattcaagacttcagtggagaaagccgctgcaagtgtagtggaaatagcaagaaaacttgaattagaagtggagcctgaagatgtgactgaattgctacagtctcatgataaaacttgaacagatgaggaatcacttcttatggatgaacaaaaaaatagtttcttgagatggaatctactcctggtgaagatgccatgaacactgttgaaatggcaaaagatttagaatatgacataaacttagttgataaagcagcagccagatttgagaagattgactccaattttaaaagaagttctgtgggtaaaatgctgtcaaggagtatcacatgctacacagaaatcttttatgaaaggaagaatcaatcagtgtgtcaaactttactgttgccttattttaagaaattatcacagccaccccagacttcagcaaccaccaccatgatcactcagaaggtgtcaacattgagacaagactctccaccggcaaaaagattatgactcactaaaggctcagatgatgattagcatttttagcaataaagtatttttaaattaaagtatatacattgtgctctttttagacataatgctcttgcacacttactagactacaacagattatacacgtaacttttttttttttttttgagacagagtcttgctctgtagcccagtctggtgtgcagtggtgcaatcttggctcactgcaagctctgcctcccgggttcacgccattctcctgcctcagcctcccgagtagctggaactacaggtgcccaccacaatgcccagctaattttttgtattttcagtagaaacggggtttcaccatattagccaggatggtcttcatctcctgaccacgtgatccaccctcctcagcatcccaaagtgctggtattacaggtgtgagccaccgcgcctggccagacataacttttatatacagtaggaaaccaaaaaattgtgtggcttgctttattgagatatttgcttcattgcagtggtccggaactgaactgcagtatcttcaaggtatgtctgtattcaagtttatattttgacatacattcttctttacttgttaaaatcatggtcacctcattattatatgactgatcagaatttgcagggttgctttgaccatataccattgttctacaactacgcagatgtctgagtcctaaaggtgaatctgtctggccagttctgggtttaacggcctatataaaaagtagatgttacacaccttgtataactgaagcgccctatcacggacacagcttaactcttgggtgggtcacttagtctgcttggttgaggtttcagtgcttttcacatctacagaaatgtcctatttgtctaaggcaattttatgaagtaaatttactcttgtcatcctttccaacctgaaaatagaggatatataatttttagcattccattattacctaggggatggtcttcagtcattcttccctgaatttattacactggccctatcttcttcacctgaaataagttaaatgtagaattagcactaaagagaaatagaatgaacttcttccggaatgggaataggaaatgaaagagagtaaatcagaagtgaatcacttcttttttttttttttttttttttttgctttgcaaatctatatttttttccagctttatttaggtatgatcagcaaataaaagttgtatatattcaaggtgtatgacatgatgatttgatatatgtgtacattttataatgatcaccatgatcaaattaattaacacatccttcaccacacagttaccatttgtgtgtgtgtgtgcaagaggaggtaagggagtttaatcatttttgaacactagctacaacataattcaattaaaattctgagaaagaagaaaaattgtcatgcagctgtttaattttagaagcattaactgacaaaatccaagtcttatgatgaatactcagtcaaattttcatgaatgaatgggagcctttacctctgaaattgttgtcatggaagaaaacactaacactgtcttacacagtaattcaagttaccaattgagttaaagtagcaagatgagccatggttgtaattgagaatggcaactatggtgttcttatctaatctgctacctagtttgcctttttgctctaaaatggtgactatgttagaattcaaagaataaaaggcctttatcctttcaggggaaatacaagtaacaagcttaattttttttttcttaacactgatgaaactcatttggggctgtggaaattgctgctagcattgaacctcttattaacattcaaggtgtgccagttttgcacaagctgtgtcatattcagagatagattgttggcacaaactaaggcacttattctcttgttttttcacttctttcaataagaacagataaatatactatttctagataagcagttgaaactgttctgctcatctctttggaataggtttgtgggggtatcactgtatgacatgccgaagaaatatacaagggaaatgctcccgcatacattgagatataaatgaatgcctattttagaatacgtcatttcttaaaagtaaaataagttttggctgggcgcagtggctcacgcctgtaatcccagcactttggaggccaaggtgggtggatcacctgaggtcaagagttcaagactagcctcgccaaaacagtgaaaccccatctctactaaaaatacaaaaattagccagacatggtggtgtgcgcctgtaatcccagctactcagaggatgaggcaggagaattgcttgaacccaggtgatggaggttgcagtgagctgagatagcaccattgcactccagcctgggcaacagagtgagagtccatctccaaaaaaaaaaccaaaaagtaaaataagtttttaaagtcactgattctgtttctaaggaattctcagctggggcttctgagtcaattctcgatggttagaacttatgagtagcagaaaaagaaaactactatggattttctctacaatgatttgagacagtgaatggggctttctggcaggttagcagttaggaactcagatgaccatagacttttttttttttagagtgggtctcggtctcactctatcacccaagctggagtgccgtggtgtaatcatagctccctgaagcctcgacctgggctcaagcaatccacagatttttgaagttcaccctggattgttgtgttctacacagaggttccaccttttgctgccttttatggttactatattattattttgatgtttcttaaccagctgaatcacattgtagtatatgaaatatgttttggctcttgttttaatggttatttgctagcagatttcacaatggcccaatgaaacaacccattcattgctatttgttgcaattcatggtgactaaacatgactccatggtacggctcaccaaagtcttggtttatgtgtgacttccaggggagagagattgagaaccatctgttaatcattttgtccctaaactagagtttttcaatggagtacttgggcagttgaattagtatgtttctcgtaggctagtgagaaaaatagctttttttttttttggcattaatcagactgctgacccacatctctgggaatacttgtgacaagatccagcctgacaatatcacatatgatttgcttttcttcttggaagggacacattgtggcttttctctggaatctgtgaagaaaatgctcctgagcctagaaactggaactgagaaagctcttcctgatcatataacaataagtcttgtgagggtcaacccttgagccatgagggcagcttgaaggaacatggggttgagagtcaagtcatcagaacttctgtttatttttctgtgtaatatttagggacttgttatgtttaactctaggcaaaggtatagatttggaggtctttgatatagatgatagatagatagatagatagatagatgaaatatattttagcatacaaaggaggctacaatacacactcatgtacctgtcactccaatgaattcatcaaatgtaaacattttccccaaatctgcttcttagctgttattcgtaaagaaacaaattgtacagaaaaatttgaaggcccccgttttaccttccccagtctcattattttctctgccaccccagagaaaacaactgtcttgcataggtatttatataattctgttttatactttgccacttttactacatatatgaagcatgcttgttacatacatgaacataaaatatacatgttttactgtaagtgtggaatgtattctagaatttgctacttttactacaaatattttattttcagaatttacccttgttattatataaccctagttcattttttaattgccatatattactccatcttatgaaaataccacaatttatttattcccatactaatcagaatttgaattgatacaatttttaattaaaattaataatgctgaaagaaatgttctttttatacatttccctcagggtgcatgtgatagagttcttctcacatatatatcagtgtacttgctgtgtcttaggatatgtacaattgcatgtctattagatatgccaaattgctctgcaaagtactcataccagtttccactcctaccagcaatgaatgagaactttgtttcgcaggtcattgccaacacttgattattatcagatttaattatttgccagttgatggatgtgaattgctctatcactgttttaatattcattactttgattatttataacattaggtatacttttcatagggccatttaaatttcctctcatctgaattgcctatttctcctcttcgttgattcttctattatcttttcttctctttattaatttatagaaatgtatgtgtgatcctaatatgtgtcataatatctatgttcatatttcatatataaatataatgaaatacttgtctctgttatatataggttgaaaagtttgctccctatctgctgattgcattttaattttgttcatggcatcttttaacacacgtgatttttaattttgatatagttaatattttttattactctagattttgagaattgctcaagaaatgactttattttgcatagtcatatgctctaatttttttaatctacttacaatagttttatgttaaatatgtcaacctttgtttcacccggaattttttatatgtatggtataaagcataaatcaattttttttactattgagaatgcttttattatattatatcttattctattctatttttatttttccataagttattggggtacaggtggtatttggttactttagtggtgatttgtgagattctagtgcacccatcacccaagcagtatacactgcaccatatttgttttcttttatccctcatccccctcccacccttcccccaaagtccccaaattccattgtatcattcttatgcctttgcatcctcatagcttagcccccacatatcagtgagaacatatcatgtttggttttccattcctgagttacttcacttagaataatagtctccagtctcatccaagtcactgccattaattcattcctttctatggttgagtagtattccatcatatatatatagtatatgtatgtatatatatgtacgtatgtatatatgtatatatgtaagtatatatgtacgtatgtatatatgtatgtatatatatgtacatatgtatatatgtatgtatatatatgtacatatgtatatatgtatgtatatatgtacatgtgtatatatgtatatatgtatatatgtacatgtgtatatgtgtatatatgtatatatgtacatgtgtatatgtgtatatatgtatatatgtacatgtgtatatgtgtatatatgtatgtatatatgtacatgtgtatatgtgtatatatgtatgtatatatgtacatgtgtatatgtgtatatatgtatgtatatatgtacatgtgtatatgtgtatatatgtatgtatatatgtacatgtgtatatgtgtatatatgtatgtatatatgtacatatgtatatgtgtatatatgtatgtatatatgtacatatgtatatgtgtatatatgtatgtatatatactatagtttctttatccactcgttgattgatgagcatttgggttggttccatgatttttcaattgcaaattgtgctgctataaatgtgtgcaagtatctttttcttataatgacttctttcctctgggtagatacccagtagtgagattgctgaatcaaatcgtagttctacttttagttctttaaggaatctccacgctcttttccatagtggctgtactagtttacattcccaccagcagtgtagaagtgttccctgatcaccgcattcatgccaacatctactgttttattattattttttttattatggccatccttgcaggagcaacatggtatcacattgtggttttgattgcatttcccttatcattagtgatattgagcattttttcacatatttcttggccatttgtatatcttcttttgagaattgccttagcccactttttgatgagattgcttgtttttttattttcttattgatttgtttgagtttgttatagattccagatattagtcctttttcagacgtatagattgtgaagatttttctcctactctgtgggttgcccatttactctgctgactgttccttttgctgtccaaaagctctttagtttaagtcccaactatttatcttttgtttttatttcatttgcttttgcgttcttggtcatgaaatccttgcctaagccaatgtctagaagagtttttccaatgttatcttctagtatttttatagtttcacgttttagatttaagtccttaatccatcctgagtagattttttgtatgaggtaagagatgaggatccagttttattctcgtatatgtgactagccaattatccaagcaccatttgttgaaaaggtgtcctttccccactttatgtttttgtttgctttgtctaaaatcagttagctgtaatatttggatttatttctgggttcaatattctgttccattggtctatgtgcctattttcataccaataccatgctgttttggtgactatggccttagagtatagtttgaaatcaggcagtgtgattcctccagatttgttctttttccttatttcttgctttggatatgcaggctcttttttggttccataagaattttagaattgttttttctaattctgtgaagaatgatggtggtattttgaaggagaaggttttgaatttgtaggttgcttttggcagtgtgatcgttttcacaatattgattctacctatccatgagcatgggatgtgtttccatttgtttggtcatctacgatttctttcagcagtgttttgtagttttccttgtcaaggtctttcaactcttttgttaagtatattcctaagtattttattttttatttttttggcagcaattgtaaaaggggttgagttcttgatttgattctctgcttggtcgctgctggtgtatagaagagctactgatttgtgtacattaatcttgtatctggacatgttgctgaattcttttatcagttctgggaactttctggaggattcttcagggttttcaagttaaatgatcatatcatcagcagacagtgacagtttgacttcctttttaccaatttggatgctctttatttctttctctcatctgattgctctggctaggactcccagtactatgttgaagaggagtggcgagagtgggcatccttgtcctgtcccagtttccagagggaatgctttcaacttttccccattcagtattatgttggttgtgggtttgtcataaatggcttttattacattgaggtatgccccttgtatgccaattttgctgagagttttaatctgaaagggatgctggattttgtcaaatgctttttctgcatcttttgagatgatcatgtgatttttgtttttaattctgtttatgtggtgtatcacatttattgacttgcatatgttaaaccatctctgtgcccctggtatgaaacccacttggtcatggtggattatctttttgatatgttgtcagattcagttagctagtattttgttaaagagtttagcatctatgtttatcaaggatatcggtctgtagttttcttttttggttatgtcctttcctggttttggtattagggtgatgctggcttcatagaatggattagggagggttccctctttctctatcttgtggaatagcatcaaaaggattggtatcaattcttctttgaatgtctggtcaaattctgctgtgaatccatctggtcctgggctttttgtcggtaagcctttaattaccatttccatctcactgcttgctattggtctgttcaggttatctaatttttcctgatttaagctaggagagttgtatttttctaggaatttatccatctcttctaggttttctagtttacgtgcacaaaggtgttcatagtactcttgaatgatcttttatatttcagtggtgtcagttgtagtatcccccattttgtttcttaatgaggttatttggattttctctcttctattcttggttaatcttactaatggtctattgattttatttatcttttaaaataaccagctttttgttttatttatcatttgtattttttcttttaattttatttagttcttctctgttcttggttatgtcctctcttctcctcggtttgggtttggtttgtccttgtttctctagttccttgaggtttgaccttagaaagtcactttgtgttctttcagtctttttgacataggtgttagggctatgaactttcctcttagcactgcctttgctgtatcccaaaggttttgataggttgtgtctttactgttgttcagttcaaagaattttttaacttccatcttgacttcatttttgacccaatactcattcaggagtaacttatttagtttctatgtatttgcatggttttgacggttccttctggagttgatttccaggtttattcaatgtggtctgagagagtacttgatataatttcaattttcttaaatttattgaggcttattttatggcctatcatatggtctattcttggagaaagttccatgcactgttgaatagaatgtgtattctgcagttgttggatgaaatgttctgtatatatttgttaagtccatttgctccaagtacagtttaaatccattgtttctttgttgtctttttgtctggatgacctgtctagtgctgtcagtggaatattgaagtccccactattattgtgttgctgtttctctcatttcttaggtctattagtaattgttttataaatttggaacctccagtgttaggcgcatatatgtttaggattgtgatattttcctgttgcacaaggctttttaccattatatagtgtccctgtttgtctcttttaactgctgttgcttcaaagtttgttttgtctgatacaagaattgctacccctgctggcttttggtgtccatttgcatgaaatgcctttttccacccctttactttaagtttatgtgagttcttatgtgttaggtgagtctcctgaaggcagcagatacttggttggtgagttcttatctattctgctgttctgtatcttttaagtggagcatttagggcatttacattcaatgtcagtatgagatgtgtggtactgttgcattcatcatgctgtttgctgcctgtgtaccttggttttttgtttttggtgtttggtttttaacttgtatttttgtttataagtcctatgtgatttaggctttaaagaggttctgttttaatgtttccaggatttgtttcaagatttagagctccttttagcagctcttgtagtgctggcttggcaggggccaattctctcagcatttgttcgtctgaaaatgactgtatctttccttcatatatgatgcttagcttgctggatagaaaattttggactaataattgttttgtttgaggaggctgaagataggggcccaatcttatctagcttgcagggtttctgatgagaaatctgctgctaatctgatagattttcctttataggttacccagtgcttttgcctcacagctcttagaattctttcttttgtcttaactttagataacctggtaacaatgtgcctaggtgatgatttctttgcgatgaatttcccaggtgttctttgtgcttcttatatttagatatctaggtctctagcaaggctggggaagttttcctcaattattccctcaaatatgttttcccaaacttttagatttctcttcttcctcaggaacaccaattattcttaggtttggtcgtttaacataatcccagacttcttggaacctttgttcatattttcttatttttttctttgtctttgttgaattgggttaattcaaagaccttgtcttcaagttctgcatttctttcttctacttgttcaattttattgctgagactttccagagcgttttgcatttctataagcttgtccaatgtttcctgaagttttgattttttttctttatgctacctatttccttaaatttttctcctttccctgcttgtatcatttcgttgtatcagatttccttgcgttgggcttcacctttctctagtgcctccctgattagcttaataactaacctcctgaattctttctcaggtaaatcagagatttttttcttggtttggatccattgctagtggactagtattacttttggggggtgttaaagagccttgctttgtcatattaccagagtttgttttctggttccttctcatttggaagctctgtcagagggaaggtccagtgctgaaggctgttgttcagattcttttgtcccttaatgtagtactctccctattttcctatggatgtggtttcctgtgagctgagctgaagtgattgttatctctcttctgggtctagccacacaaccagtctacctggctctgagctggtactgagggttgtctccacagagtcctgtgatgtgaaccatctatgggtctctcagccatggataccagcacagtatttggggtgtctcctgcatcctgcaggagcagtccacttccttctgtgggtcctctcgggattcctgtttcattcttgaagtctagatctattttttgacagtctaatcctaacaccatttactgaggaacactctttttttcattgttctgtaatgcctcctctgttgtaaattaagatcccataaatgccttggtatttgctagactttctttttcttctgttgttttaaaattttctctcccaacaagataaaatattgtgtaaatattatatgtttatactaagcatttttatcttgtactgaataatagtgagaatgcttcaaaatttcactgtttttgctattaagtatgatattaagtacgctattaagtactgtataggtttttggctgacttatttttgtcaggttaagaaaactgctctctatttctagtttattaagacagtttatcacaagtattagcctataaataatggtttttctgcacattcgaataatcatttgattcccacttttaaattattaatgctgtagattatattgatagatctgcctgatattaaactatccttgcattcttgatctaaatcttacttgaatgggatgtgttactgtattctctctctctctctctctctctctctctctctctctgtatctctcttcctctcttcatctctcttctgcaacatcttaaagcatattttggtaaatttgctttttatagttattgattttcagaaatatttctttgagaagctaaaaatgcaaaggttttatttcaccttgtttcaaatatagtaattatctaggaataagaattgtccattttctacctattgagaatcaaaacattcacagaacataaacctacttgtttcaaatatggtagttatctaggaataaggattgtccattttctacatattgagaaaaaaacattcaaagaacataagcctaaaacctctctttcttttgtttctaacctacgggaagcctgtcacttttctaaaagttatgatcaggctgagcttcactcccccttcctgggctctctggtagaatatgccctcccaagtcctccctagtgtgagtccgcccctgtccccacccatcccctctatccaccaccgcccccgctctcaggctgccctgcagttgtttcttaatgcagcagaaggctgcaacaaccacaaactacattgcccatgatcaacccatgcccatgtccttctgcaccccccagtcagactacccactcccacaacaaccaatatcagtgttcccatatttcatgcattatctatccttctctcaaataaagcagatctagcacattttaattatcctttgtgacagtctctagtattttccttgtttttttttttttgtctagaatttactttcatcttctgattcacaggaaatttgttccatattgtttttttacaagcaatatctagttgaattacccaccatgttttacttttttcctcaccattagttcattcacctaataaattcttattgcatgccttgtgttttcctgctattgtacatgcctggaaatataggagtcaaccaaatcgtctctgagctcatgtagttgacaatctagttagagaacagagatgataaacaagtaaatatatatcaaaaataattgccatggagaaaaattaagtagtataaggattattatttatctaggttgtcaggcaagagcttacagatgggtgacatttgaatgcatacttgaaagaagtctgggagaaaagtatcccaggtagagggaatagcatatactatttgggatcttcaaggaacatcaaagaggccagtttgttggagcaggatgagcaagaagaacgtagtggtaaatggaggcagagatagtgggtgagagtggggttgggaaaaaatcagataggactttcagaccactgtaaatacttggtcatttactctaagtgagataggataccatgacagtgtcctggaaaaaaaaaagggacatgttcttattttagtgagaccaatttgggtgttgggaataaggagattcaaaagcaaaagcaggtaggccattaagaaactgttataataatccagataaatgttggtgccttggttaagggagataaagatggagatggtaagaagtgatcgcattctggatgtaatttgaaggcatgtctgagaggattagttgatggagtgttacttatggggtatcagtgaaagaatagaggaaaggcctgagaatctggaaagatgaaggtgatatttactgaaatggcctacactcttgaatgaatagattaggaagtaaaattgaaagtctggttatgggttttataagtttgagacgcctataaaacattcaaagaaattattaaatagtgaactggatatatgagcctgtagttcaagaaagaggtctggattaaagttatgatttggacaacatcatcatatatgtggcattagtgtcatgattccaaatgagataatccagggaataactatagagaaaagaggagaggaggataatttctggtgatatttcaatgctaagtggttgggaaaatgaagagaacacagtgaagttgaccaggatgaagtacttactgaggtggaagaatcaatggagaagggtgttcaagatacaaaattaagacagtgtgtcagagaagtggggagtgatccattgtggcaagtgttattcattggttaaataagatgattaagaatttgccacaatgtggaagtcattggtgactagagcaaaagctattccattgatgtagtggagattaaagcctgatttcaataagtttaagaaattgggcaaggaggaattaaagaaaggagaataagacaatttcttcaagaagttttgatttagaggggagcagagaaatgggtcagtaacttcatgagcagtaactgaaataggagaaattatcctttttctaaaaggagataattttagtgcacacttaaggtgattcttatcttcctgcaaaaatagctcctttaggtatttttcaaaattttatacatgtatatttctattccaatcatttttggggtacaagtgatttttggttacaaggttgaattgtatggtggtagtgaagtctgagattttagttcatccatcacccaagtaatgtacattgcacccaatatacacctttttttatccctcagccacccctaccccctcctcagtctccagtgtccattatatcactctgtatgcctttgcatacccatagcttacctcccacttacaagcaagaacttcatggtatttggttttccattcctgagttacttcttttagaatagtggcctccagctccatccaagttgctgcaaaagacattatttccttcttttttatggctgagtagtattccatggtgtgtatatatcacattttatttatccactcattgtttgatgggcatttaagttgtttctacatctttgcaattgtgagctgtgctgtgataaacatacatgagcaggtatctttttgatataatgacttattttcctttaggtcgattcccagtagtgagattgctggattgaatggtagatctacttttagttctttgaggaatttccatattgttttccatggaggttgtactaattgacatcactaccagcagtgtataagtaatcctttttcactacctctacaccagcatttattgtttgtttttgggatttttttgtttttgtctttttataatggccattctggctaggaaaaggtggcatatcattatggttttaatttgcatttccctcctttaggtattatttaatgagagtcttttggtggtaaagtatcttagttttcatgtgtgctcacacacacatacacagagtctttagtgacaggctagttgggtatcaaattctgaattgatgtttttttctctaatacttttaaagtttatttgtgttctggcatctgttgttactaaataaaaatcttccaccagtccatttgagttcattagcaggtaatctgcctcttattttaagcacttttaaagatttttctgtatcttgatgccatatgatagatctaccttttattatactttactcagtaattactgtgggcttttaatctgcaaactcaatcaattattcgattttataaaattatcagtaataaccttttctataactgattatttgcagttgaattaaatcctctctttctggaattccaatcatatgtgtgttggagcttctcaatctgccctccaaggctcgtaactgctcttttaaatttttcagtactactctcaattttttttttaaaaaaacaacctaatattgcagtgtttggcacagaagaagttcaaagtacaactttgcactgccacgttgaccagctattctggcactggttattctttaaagttatttttaaggttaacgtaccttatcaggcagcaggtctcaaaacctagggaagcttaaaagcctaaaggcagcctggcaaaaatcaagctgattaaaatgctctttcccattttcttgtcctcctatgccctcatccctaaagaatagtgagagggccttccttaaaaagatatgtataaaatagcagaaagaaaaaggggatccagcaagcgtgagaagacatacttagataattcacagtaaatgttccaaataatattcagcctcactaattctcaaataaatgtaaaacaatggcagatcatttttatccattaaattagtgaaaataggaggaaaagaacattttgctgacaattgttaacagtgaaactgaaattctcttcttgtctagtttgaatctaaattaggacagtttgaaagcaattgggtgatatctatgaaaaatctcataaacattctacccttccatgtagcaacattgcttctgtgaatcaaccattaggcaaataaatggaaataacaaaccaaatttccccccacctcccaagagatgtttattgtaacattactgataatattgaaaaactagaagcgatctatatcagtgatccacccttgttttgactgtcactcaccgtaagaaaatattaggtatacaaagtaacccaacagacacacccatgcatcaaaaagttccatataaggaaaccgttcaatccattccatttatttaaacaagccaatgaacaaagctggctttgatccactaaattgatcctacaacctaagagtaggttatgactcagtttgaaaagcaccaatctgaatgtcctataaaagatatatgatggaatatgaattaaatttgatattcacaattttttacttttttttgtttgagggtagttggaggggtactatgtttcttcagccagcaaggaagataatgtttctagataactccatataatggagatttactgtaatgataccagatctgttctactatgcccagccattcttatgtatctgtctctcaatgcatcatgggtcctttatggattcttttgtgatgtcctcaagcttcctgtccactccctagcaacttgcccaaactgatagaaccggcctgaatcagtcaacatctgatttcaagcattttctcttggtcagcctttggtattaggactttattctcaatctaatcaattaatattagctgagctaggttgatttcatttgaatcaacaaagaattgctaaaagctgcatttcctagaaaatgtggcaatataattggcaggtacttgagagtctttaatgttaaatggaaaaaaaataaaaaataataagagacaactttttatacggagcatgttttcggttttctttagatattttgttagagacaaaaaaggaatccagaatttattttatactacattagtacttaacagatttctacataagcaagtattatgcatttgtaatcagaaaaaaatatcaaaattagctctgtggaaaatgatcatcttgcaagcaagcatcatgtacccctacttttgatttagctcatcttcttgatgtaaatatgaagtgtctgcgcttgaaattctgtttgaagtggaaatcttcatgtttgtcttacaaataccatctcagagtacattgctcagtataaaacttgttttggggggttgggtacaaaaacctgcaaagatatagtccaggctccttttcccaaagtccttcactttcctactcttagtataaccattattttgtaaaatttaataaggcccctaataacttggggtttgggaatttgatttgaggtaacatgcctcagagtatcacctattttttattaaaccaacaaatttctatctgacaaagatgtgcatttatgtgggccttaataattcccccaaataaaactattcgtaagttctaacagttccaaatacttttggtttcagcacactaataggatttatagctgtcttagataaggagcagtatcttctaaagctcatgaaaaagccatatcagaatgccatgtgttcaggtatatttccttttctttatggtatcaagaataaaatctcagcttatgttttcactcaagtgttgtgtgattactttttcccattactctttcgattgagcctgaaaaatgaggtgaaaaaatctttctctttcaaggatgaactagaaggatctaggctggctggtcaccaaaccactgactagttggccctttgtctttttataacccctcattgtctgggatccaacatcatagtgagtctcagacatgttccacaagtctagatagccctcatccatgtgttcagtggtccagcccatcagcatccaagccagcagggtgaggaggggaagtgtaggggatgctcattgccctgaaggatgcatatgccacttccattcaggtcctgcttgccagaacatagtcatgtgaccacagttagctgcaaggttggctgagaaatgcctttcactgggttctattactaactgaaaatgggaagagtgaaagttggggataactagtaaatattagttagtccaagtcatggattgtggtattaattccatgtgctaggaaggtcatttaaatgttttatgcagaaggatgccatgatgataattatgtttcaaagcatatttgtgtgtgagagagagagactgaaagagaaagtgagataaatggattggagagaatttgtctgagtgttaagaggccattctcaaacccaagtgggaaatggtggctagtaacagtagtgaggataaagggggatggaatggactcaaaagatacagaagagataacatcaaaagatgaaacaggggcagaggaggaagaaaagacatccagataactcctaggtttctgatttatactgcaaattctggggatcaggtgtttatggaccactgagtttagttttagaaacgtgatttagaggtatttgtcagataggtggtttctacacattcaaaataagatttcaaaacatattagccacaattcacaatcagcaaaattctcaaatctagtcattgtcaactaaactattaaaatgaattttcccctctaagtgtttctcatcttaaagggtttgtatgtattacatgtcacagtatggtttattgcatataaacatgggaaagcaagccaggcagaaggagtcttgtaaccagctaaaggcccagctaattcttgaagcagtcataaatcatgaacggtcttcttgtgttaatagtgtggacaggactgttggtcacacacaggaaaatgagtcacacagtcttgtgtgtacagcaactcactccacactcaatgatgggaatggtcatgattgttctaactgtgtgagcagctacaagaattatggcaaagctccagagctagaaagctggttttttttttatgtcacccgagtatgtaattcactaaatgtttagtattttataccttttagttgacttgtgagccctttctaaaggagatctatttccctctactagaaggtaatcagaaaaaccctaaactacgttttctaaatgctgtgttcttctgcccaattgaccaaaatatacttagttgattaggactttgaagggatgagatgaggggactaaattaagatgcaggaatttcagttttctaggggttttctgtaaactactttatactgctgacaaatggttaaatgtttccaatgaaactaagtatgctaggatttctaatgagcaatgaaattttagaattcatttactcattaatttcttcatttacaagatgtacaatgtgctatcttctgggcatttggggtactttaatgaggtagcagtgagtaccacaaatggtcacttctgcctttgttcttatactccttagagaagggaaaggaccagattcagataccctatcactgctttctacccatccagatcagagcctttgctgagttctaacgcttagccctcttctcagctgatttggctgcctccattgtaataggcctcatgagactccagcctaggcctggccttcagttcagcaggcagagcccagagatgtactgggcaaaggtcaggggatttattatatgagacaatggtctgatgtgatttaatttactcctctggtaccagatatgtgtgtgtgtgcatgagagagagagattgagaatgactgatttgggagggattttgtgaaggtttatatatcaaagcagaaagaccaagaatttagagattaatacatgccaagtggtaaccaagaaacttctgtgggatcccacctccaacccctccctctctgtcagattttaaccaaatcagtgtgatgtgatctgcttgcatatatgagtgaaagaaaaaggaaatttaaaaagttcttgatataaagcctggaggaaacaatacgaaaatccagcctctatttcagcaatatctgccggactattggttagtattcccttactgttacttattgtttgattaaaaggctgatagtcagggttttttttttcttacttttgcattttttagatataaatctttaatatatggctgtggccagatgttttcctttctcctcccacttcgttcttccctcttctgggttaatttctcattgttctctcttccccttacttctctgcccttttcctttctactctaagcgaaacttctttttttctgtgctggagtttataaagtattcttttaggcaaagaaagcctttggctgccttcctccttgtctggtcaccatcaagatataattttggttttcaaaggttgttctctgaaggaaggactagttttctgagcatttagagagcagatacattttgagaaagtcaacagagatagtaatttgcactcaggaaatacttaagggttttaattctgttccatgtgttacatttcaacagtttacattaagaaaagtattgtaaagagaagtgataccacaattgcatgtttattttgcatctttagtctgagagatggtcagtactttgaaggaaagagaaatagggctttgtctccttctgcttcttgctatacctcttttcagattaactctgatgctttgggtttcttactgcatgcctgattaaaacccatcccataatgcctgatgtgatgggaaccaccacttattctatctcaatggaaagtattcacatgagctttcaacagaaggacattctcccacctcttccaaacacctctttgaaaaccgtgtccatgggcctttattcatgtcttcaacaatttgtttaaaactggttgtgctaggtagtgggcaatataaagatgagccacaggagagagatgacaatatcactgattccttatagtgctgtaataagggtttattaaggctgtgatagaagtagagaggagaggcacctgacttcacttgggagtggggttgttgctaaggtgtttctaagttgaaatgtccttgagctgaggtttaggggaatgagtagcaaagatggattaagtgagaagagtataggaggcagcagggccagaggtgtgaatagcccagaaccttctgagaagattcctttgtggacggaagaaaggggaggtttgtggaaatggtggaagataaggtaggaagaggccacatcagatcacacatggctggatgtacctctctaaaagtactggggggtttgaaacagaggctataaattggcagtttaagaaaatcactgtggtgtcagtgtgaagaatacatttttgcaagattctaacgaggattattttcagaaatttaggcccaatttagtccagatgtcagggctagtttggagtaaatttctttctttaattactccagggctcttgtattgcttcaaagaaagtagaaagtggaactcaccctcattcagggagggtgggcaagcgaccagccagctggggaaggccaaagagccaggtcaccttgtgcccgcacttgttatgatttgtttgtattgtctgcctgatgatcaatgatattagctatgacagcacgtatgagcctggggtaagtgtgtcttcttgctacttgaagtgcttcttgaaaatagtggcaggctgaagacaacaaggaatactgaaaaagcccattggactggggacaggagacctggtgctgctcccagcttggccggcaccagctccgggggcttagacacattacttcacctctctgggcttaacttaccccatttgtaaaatgcaacctttagactaacactgttctcggggccatgttcagcctctggcttctgtcattgtgatcctgcctccccaaggttcccctgggccccatcactactaaccctaggcttctagacattctgattcatagagaaataggaaagcccatttatcttaagttaatgtcagccagaagtacagttgtgtcttaaggaatctaatctagtgaacatggaaaataattttctaaggaaaaaaattgtgattggtgttctgtcctgaactgatggcaaaagggaagcagaaccacttcacacatctcaatctctctgttttttcctttttatcctcttgaatttttctgcctgtttgtctttcaaaagtagagaggagtttgaatggggatgctgaggagactgagggtagccaccgatgggggaagctggactgtgggaagccgagttctgccacctgacaaaggggcacgtgtttagtgtttatttggcatagcagctgttcaggtggagcccaggcagaattttgatgtcgttgggaccttccatacctttctgaaattctcttgcaccaacacccggcaccctcaggttatgttctgctgcccaaagcctgaggctcaacttctagccctctcttttctcttttaccggaactaacttctaaaaatccagaaatgacaagtagatggtggtctggatgttcctgaggtggaaagagaacctctagtgcctctggctgacattatatccactgacagatcccctcccgcacgcatacatgtcacatgtttctgctcatttatcaaatacagcccatgctttggtgattgagagcagagtggggattataagttgatgcagtaggcctgtgtcttgcccttagaagtttacaaacagcaacacaggcaccaagagctcatctgttacacccacagggatttatcatcttgtgacttggatattgtggaatgttttatagtaaaggttaaaaaaaaacaatgtaggcacagaggagttaacagctaagttgcggtggggagtctggaaggcttcatggacgtggtgatatttgaacgtgactttgaagggtaggtagagtcctgatttgtctaacagtagccttgaaagtaaaggaaacttgaccatgaagaaggctgttgaaagtctggagaaaagagaaggtaggagactaagactctaggagaaggtactacgttccagggagaatgcagaggtagaatcctccctcatggtgacaagttaaatgtgagaagggatggagtaaccaactgggtgaaccctgatctcattaagcaaaataagaaatagaagaaatgaatctgcatgctcataatgtagggatcagaagcaggtaggaaatgctgactttattttagacagaggttattttaggtacctgtggacatccaggtgtattatttccctatgtctgaagcacatgtcctttggttctttagcattttgatgatgatgctccatgtaaactgccccctaggattttctataagttttcttcctcatttgagagtaaagttttaactggtaacatgatcacaagtggttgaaaagttaaaatgttattcatatagctttccaatgaggggagcatgaatggtttggtactgttttacaagatgtgaaaactgatttcacttaagtagactgtaacataaagtttatgtgtctgtccctttggcttcctggtaggtggacagtctctctgaatcaatagtggctcaggcttctgatttcaaacctctttggccagccaactggtttaggagaaacatggccaggtcattgaattataatttcctgagttatgttgtggtggtcccgtaggacagtaaacataagcctcctgggaactgaacttttaattcaggaggactgaaaacaagctcttctgagccaagatttgcaaggacatgttacaaagatagactggccttcctgcttccacaccattttttcctccataaatacatgctccttttccgtatttttcttctaccctagtctgttgtagattttgaccttggctgttactttcctaccaacacattgcctatttttaagtttcctggtttgacctgatgttaagatggaaagcaaagctagcaaactgatggagatagggccttccagcctttctaactttccctgggatcatcttatgttgatttacatgttcaaaaaatttttaaaaataaataaattgtatcagttgatccagaagtgattagactctaggggcctgatttatcttagccaaacttaagagatgagccaatacaccaaaatgccaatatatttgtttgttctctatggcactgtcaagcaatttcatttcatctgattactgtgttcattttcctgaaagatagtgaacccagaaaacaagaatcagaaggtcatttgacaactgtggagttggaatagagggaactgaatgaccctctattgggtcatgagggagagcatcatcaagctttgagaaattattgcacctgtctctgtgttgggacatttttttggtcccaggtagttggaagagacaaagctgtaaattatttactagtttttcaacatttccttatcacttatcgttaactgatggaactaagttttctctaaagtcccttatgaataaaattgctagacattgcaaaaatgcccctctcaatattgacatgcttcagtggtgattatcttcctgattaatgtttacagtcaatctcaagctctataatggactcttaaaggctgtagtagttttctattgcttccataacatattaccacaaacttagtggcttaaacaatacccatttattgtcccacagttccatatgtgagaagtctgggcacaccatggcccaactgggctcttgcttagagtttgcaaggcagaaatcagtgttgttagggcctctagggatgaattttcctccaagctcattccagttgttttcatgaactgagttccttgtcattgttggaccatgttccccatttccttgctggctgtcagctgggagccagtttttgctcctagaggctatctgcattgcatctcatggtttctgtgtgcccccttccagcaacaagattctatgtacccccttccagcaacaatattctatgtaccctcttccagcaacagaagatcaagtccttttcaagtttctagtctctctgacttccccttctgccatatctcattctgcttttacaggctcaggtgattacatcggtttgtgcagataatccaagataatctccctgttttaaagccagtgggttagccatcttaattacatctgcaaaattccttcacagcagtacctagattagtgtttgaataacccaggatggtaatcttgcgggggatcttttagcattccatctacccagtctcatcagcaacactttgaaatattgtcgttgagtgatcatttctgtggccggctgatttcatctatacaagtgtattctttttatttgccattttataggataatattttctgatcttaattccatatttcagtattaaaattacttgacatagatccataaatcatcatctgttgcaaaaaagcacattaattgattggttgaatggggagattgagatatttcttttctcttcttctgctcaggtgggggcaacttttgggggcagatgagttctgttgccacaaaagttatatagcacatttggtttgcactgaatcagcgattctcaatcctggccatgctttagaattatacaagaaaaatcttcaagtatcaatactcagtccctatcctactgatccaattcatctatgataaagccagagcattgatttttaagttctgcaagtgattctaatatacagccaaggctaagaactactgatatgttccaaacactctattttggagataaagaagttgaggctgaggatgagaacttagtcacataaagttccataactagtaacagacagaagttctgtcctacaaaaaaaaaaaaatttgatgctttaattgtatgtagagttcagtgctcagtaattatgtacaaagtgagtgttgagacgatctggaacaccctacttcttgctttagtaggaagactatttctttctactactttaaaaaattatcagatcttgcaaaataactgtatgaaggtctcttctcagcagctttggcctgccttgtgagtaataataaacacagatctattctacactaactagggagctggccgcttggacttctactacctctctgtgttccagagcttcatggtacaatgcagtagccactagccacatgtagctattaaacacttgaaatggaactagtttcaactgagatgtatgtgagtgtaaaaggcatactagaatcaaagatccagtatgagaaaaaaggtgcaaaatatctcattaatacttacattgattacatgatgaaataatatttgaatatattgagttaaataagatacattattaaaattaatatatcaatttttaacttttttaatgcagttgctagagaatttacaactatgtatgtggttggcatttgtggctcacattatatttctgttagcacttttctagggagtattttctattaaagctattaacaatgaatggtccaagtccaagctattacacctcctttgatcctgaagagtgaaggggtacactgtaaacttcctggagatgagacatgatattgatctgccctgtgtttgccatctatctggcagccagtcagtctggccaaatagacttctatttttacatagaagcttaaaggaggcaggataatgccccatgtcatggagagagcacactgcatagctcttgagtaatgtacccaaaagtagaccaggtgctattggaggttctaaggcatagcgataaatattacatcccttgagcaatgtaatacagcccttgaagaaactgccatgtcagcacttatgaattatcactgtctttgacaggccctatgcactgaaaatattatggtgtctacctctctttataattcacatccaaatattactctgtctttttcttgctccctgtagtttgttctgattcactgctaccctgattgtgtgtttagtttgcctagttcacaattgaagaagcatgggaaagtaaaggcaggccttggaaagatcaagcacagttcgaaaccctacccagaattattctgtctgtgtgagcttgggagatttacttaacctctctgagctcctctaaacttccattttctcatttgtgaaatgagcctttctcttgcaaggtctgtctgagggttgaatgaaataagaaggtacctggcacacttattttttgggtagatgttgtagtgaacatctactctgtggcaagcctatggctaattgttaggatgtaatcgtgagtgagacacagctactgcttccagctaagagaagagaaagacaaggagcctggtaacgtcgggacatgaatagccgtcaatgaaaggcagctattattacactgcacagtgcaggatttggcttataacaaaattttagaagggtgttcaggtgagggaattgagacccatagtgattaaatgactacctgagtcaccagctcggacaatgctgggctgatgtcaggttacgggattgctgactcctcctctagtaatgcctttcctgggagatcacattgcctcactcttggtttcccaacttgtttaccttcaaagaataactttaccatgttggactcgataaaaggaaagaggggtttcctccaatttttgctccatttgttattagggcatgctagtaactaactgtctttgaaaacctacgcttctgttaactccaaagaaggcaggaatacatgcacttctttaagatataaaaagtatttagtatactataaattattatagtaatcattgttagattatatctcaccaagataatgaatgtttttgtttgaagacttcactgtatgagaaattgtctcctataccttatttatctccttttagattaggtaaaacaaaattttcaaatttgagtctgaagaaaattccaacatctttaaatttgtttaaggaacattttccatgatctatatgatctatcatagtaatttaaaaaatcagattttagaatgagccacgtgtagaaagagaaaaaaagtagaaagtcaataagaggtttcatttttcaaattttgttttggaaaaaactacttggtagggacaatggtgtaaagtaagatataagaaggaatatactgttcaaataagcggccatgcaattgattttctctttcatgtaacaatcacatctgcattgtgaatccgttagtgcaccaagtgaatcaagcttagtgagttgacaaacatccacagggatagttgcggggaggcattataaagtgcaatgtggtcctagtgaaacagaatgcttcgttctttgagaaagttccactctgaatagaataacggtgcataccaatatcggagtatggccaagcatttggctactgacatgccccttcttctttcactcctccataaaggaagagacagagactcaggttcttgtaactcagttgccttttttgagttctcccaagaaaagttctaacttcaagccaagcgtcttgtcactgggatttctgtatctaatttttagttctagaaatccatgatttcacaaaacaaattatccaaacctaacgacaaccacatagaactttcttaaagtagacgagggaggaattagcccctaaagtatttcctgcacaattggaactcactatagaagatgtacaattgcctgtacacccaagcacaaataggctgtattattgccttatcctaggagatatacactttacattatgatggtccttccctttcctggaccttcatatgatgtaagtgcttgatttaggaatagggtcttacatattgtggctggcgaagagcacatttgctgattgctctaccacatgcctagatgtcctcttcatgatatataaatgagggtccctactctcaatataccccataggaacataataaaacataaatagtctatttgttactactaccaagaagacttcagtaagtgtaataactaacccttttggatacatgcagagggaatgccaaatgctttaaataaattatctcatctaatcctgatttttttattaaaaagggaaaatcttatcatatgaatattagagatgagtaaactgaggtttggtagagctgggatttgaacctagccctctgtgactccaaagcacattcacttaaccccaagcccaccctctctgtaaatgaagattaatgatagcatctgtggtagaagctaatgtctcctgacctgggaaaatatctttcaatgattattaactaaatgtgatcagctgccagtggatcagatgtcatcaaataaaatcgagtgtccagggtttactcaacagtactgtctcttacattttttatcaatgttagtagattgcttaatctttgtacctgttacctcacatgaagcctagatagcatcagtcccttccccagccagtttgtgctgggttcagcttctggcttgtgaatccagtcagtgaattaatgttggtagcttaaaaacagccctgagagaggtatttacatcacagaaattggcaaatgatacaaatcatgaccctttttttaaattccagggagacaggtgttaaacatttaccagtacaccactgtctatgattcaaatcgggacataataattgtatttctgaaggtaaacaaatgcacactgagtacccttggaaaaaagcaaccttccacagatacaatcacacctaagtcacctaagtctttagtgaattttttgtccccatcattctgcatttgggaggaccttttacaacataaccataatgattttatatgtcatttgaaattttaaaaaattactttatttgttcatttttgttatgaaagcaaatatgcccatagtaagcatttaatgtttttgaatgtaagtgcagacatataaaccataaaatgtatatacgaatgctaccagtagaaataaaatgcaagccacatatgtaatttaaaattttcaactatagtcatgcaccacgtaatgacttttcaatgatggactggtcccataaaattataaaatcatgtttttatgacatcttttctatgtttagatatgtctagatacataaatacttaatattgtggtaaaattgcttatactattcaatagagcagtaacctgctgcacaggtctgtagcccagagcaataggctatcccatatagcctaggtgtgtagtaggctataccatctaggtttgtgtaaatacactctgtggtgttcacagaaccatggaattgcctaatgatgcatttttcagaatgtattcctgtcattaagtgatgcatgactgtaatcacatttaaaaaataagaaatatttgttttaataatggattttatttaattcagcagttaaaaatatgatttcaacttgtagtcaacgtgaacattatcaagatattttgcatcttttcttcttgtactaagctttcaattctgtgtatattttatacttatagcacatatgaatttagatgctaaattttaatcataaatacttgatctgcatttacatttcataaaatgtaaagcttaaaaagtgggttcatatatccaatctgttatagacttacatatttaattaaattaaatttaaattgtcattgaattcctcaattgcattagccacattttaagtgctcaatagccacatgtgacttattgtaacataattggtcattgcaggtacataccatatatccttattttataaaattggaaacctaggctggatgtggtggcttatggctataatcccagcactttgggaggccgagacggaaggatcaggtgaggccaggaattagagaccagcctgggcaacacaccaagaccttgtgtataaaataaacaaataaataaaaatagctaggtgtgttggcacatgcctatggtacaagctatttgggaggctgacgaaggaggatcccttgagccaaagagttggagactgcagtgagctatgattatgccactgcactcccaacctgggtggcagagtgagacccatgtctcttcaaaaagtaaaaatacaaataatataacaaataaataaataaaattggaggcctactatatatacaactcccaaaagtcttttcccccctcacacgttacacatttaaaattcccatcctgcattccctgctggatctccaagaggagagaaatctcagcaaaagtagttatatcaaaactgtctgtgagctttttcttcctcactcataggaaggaaataaattcacataaggcattttggatctgaccattttccaaattatcatcaccataaaaagttggtaacaacatgaactctgaaagcaagctgtttcaatgcatgcctggtgctaatgaaaaccagcagttttaaatgcccttttgggttagcttcttcctttttctgtgctgtattattagaaaagcttcaccaaggagatcaactagatataatttcacaatatttcttagtaatcaatgttggcatttactcttcccatatattaatttattaacatcatgcttctaaggatgctttaatcacttttttaaaaaaaatacttgatacaaattagagggtgttagttattttaggtggtgatttgttttgtttctgcaaaattacaaaccagatatgagcatattattccctgtgtggcttaataaactgttttttcttttttgagacagagtctcgctctgttgccaggctggagtgcaagggcataatctcggctcactgcaacctccgcctcctgggttcaagcgattctcctgcctcagtctcccgatcagctgggactacaggtgtgcgccaccacacccagctaatttttgtatttttggtagagacggggtttcaccatgttggccaggatggtctcaatctcttgaccttgtgatccacctgcctcggcctcccaaaatgctgggattacaggtgtaagccaccacgcctggccaatacacttttaatataatttttgataaaggtgttatggagacttgtcaccaaatagtctagtcttcacattaaattcacatgatactcctcatctctatttagctctctctcacctccagtaatgacctcccttgtctctcagtctttggtctcttaccttcagcttcccactagccgtttctcacatttccaaaagtcttgtaattgccttaaaacaccaagtatccaaagcagtcctatgaccttctcctcctgctaaccaactcagatccccaaatcctgatttctttcactagcactatctctcatccacacatactcagttatttgtgatagacatgtctctatcatctctcatatccaatcatcaccaaatcttatcaatacttctcagtgatattaagttaagaagtcatgaagggcggctgtaccctaaggaaaacccacttttgcacaaatctgagtttctgatcaatctgagttcagaatgctgttttaatctggtcctacctcgccaatctaattttaggcccttttattcgtgaatttgaaccttgttctctattcaccagcttcctcagaatattgtccaaaacatactcagaattcatactcatatccagaacatttgctctgagcttttaccatacaagttcaccacagtttctctcccttttccatatccaccaaagccttatctgtcatttagttttaattttaagcccttcagtttgatagctgatttttccctagtctgaccttctattttcgggtatgctccttcttttcacagtttcatgtgtttgtactgccttattcttgaagaaccattattttgattgcttttgcattaatctccatagtgccttgctcagtgttagcaggaactagtagtttaacaaatacttgctaattctaaattaaagagcatgaaacatattgttttctttgcctggagttggttatagcatgctggaaaaagtattatatctaaccttcatcttttctcatgtgtttatgaactgttttatagccaaagaataagttagtatatcatgggcctaattatgtaatttggaggcctcctctgctgggcagtctacagatttaaaattcatgccagctgcattacgctggttttgaacttgctttttcttgagaaagatggggagcagacaaaatgcctcaggctttgagggtagaaatggtgtgagttccattatgcaagaatagaaccccattttttaatccctcctgctgaaaatcttgccatgaggctatagccaaagaatgtgtaaatatcaaaagaaatttagagagggattttccctaggaaaatattgcaagcttaaaaaacccagtgggctaaggtccaatttagtagattcctccgaacaatgccatcctctacttagattgttacagaacttcttatgacagcatttgagtagactcctgtacctctgggttaaaaggtacatgtaataagtttaggtacctgggcaaaaagggcttggcagaggggaatagagggactttcttattctcacatctagtatatcattacattgtaatgttagataacattaaagttccaaacttcatgtgtccgcactctgacgtttcctagggacattttgtctcagctagaatctaatagagaaggattccctcatctagaagcttccatatggggctctgtgaagatgatgtggacagtgtacaatccaattgaatgtcacgtctcgtggcctggctcatgtgagggcactagagagagttctccagaggagtgcagatggggctacttttggaatcattcccactgagccaacatcagtggaagagaaggggaggagttagattctaataaagcccttatcttctgctgaatccatccacatttttttatcctcctcctggcccctgcacttagttagagtcgggtccctatgcagtgttccaggcggcagtgaactgcattcacctcctgtttgggagcatggcaattttaaatacttttttctgctgtaagagtatgcaaacagatttctggttaattttgtgttgaggattcttgtttgttttttgttttgatagagcacattctatggacatatgttcagcttgtaaaggaagtgttatagttccttttttttttttttttttttttttggagatggagtcttgctctgtcaccaggctggagtgcagtggcgcgatctcgactcacttcaacctccacctccctggttcaagcgattctcctgcctcagcctcccgagtagctgggattacaggcatgcgctgccatgcccagctaatttttgtatttttagtagagacggggtttcaccatgttggccaggatggtctcaatctcctgacctcacgatctgcctgcctcggccccccaaagtgctgggattacaggcatgagccaccacgccccacctagttctttatttggaagaagtgaagttcatttgcaggcagctgctttcaaaagtttggggattggaggaaggtcatcttctattcaactgaagcaaatgccacttgtttgtggcatctgccaggcatccttgagatgtctgaagaggtgacttccaaaccagaggatgcagccttccgagaaatgcaaacctgttcacattcttgctcagatgggaagcagaaaaggctgcgtgggaattggggatttactgttatactctggcattggaatagcaggtgctactggaaacttctttacctgacactaagtgtcttgggagataacaagtaaaattaacacagcatccagttcttcagtgctttctccacttaaaaagaatcaggctgggcacggtggctcatacctgtaatcccagcactttggaaggccaaggcgggtgggtcacttgaggtcaggagtttgagacaagcctggccaacatggtgaaaccccgtctctactaaaaatacaaaaaaaattagccgggcgcggtggcgggcgcctgtagtcccagctactcgggaggctgaggcaggagaatggcgtgaacccgggaagcggagcttgcagtgagccgagattgcgccactgcagtccgcagtcccgcctgggcgacagagcgagactccgtctcaaaaaaaaaaaaaaaaaaaaaaaaaatacaaaaattagctgggcatggtggtgcacacctatagtcccagctacttggaaggctcaagcaggagaatcgcttaaacctgggaggcggaagttgcagtgagctgagatcgtgccactgcactccaggctgggcaacagagtgaaacaaaaaaagaaaagagacagaatcaaatgcaaagtaaatatttagttaccaacaggatggcatttttagcctataactttttttcagccttttaatatatttctgctggaggtttccagctttgattacatagcctgttcacctaggagtaaaggacattgggagggagagatgctcagtggttctcatttgcaaagtagacgaggatgatgaaaggccatcagctcaaggccttccaggttaggaattaaaaacatgaatgttgtaaaaaccacaactcatatttatttgaaatctcacaaagtgtgagatttatttgaaatctcacaaagtgtgagatttatttgaaatctcacaaagtgtgagatttatttgaaatctcacaatgtgtgagatttatttgaaatctcacaaagtgtgagatttatttgaaatctcacaaagtgtgagatttatttgaaatctcacaaagtgtgagatttatttgaaatctcacaaagtgtgagatttatttgaaatctcacaatgtgtgagatttatttgaaatctcacaatgtgtgagatttatttgaaatctcacaaagtgtgttcatctgcatgtttctcacgtgaaatctcacaaagtgtgttcatctgcatgtttacactcaatcctatgaacgactccatgaagtagtgtatgaaggagagttcctcatgcatgtggatttgcacatggggattcagatacaagaagacaatttagtttacatagagatgtgcttttttaaagaaatttttaagaatacaaaattatatggaacaaaaaagataggtcctctgctgtctagaaattaaagtacgtcaagaattttatccctatgtagaattacacagccattgccgggggccacatctgtaggcccatggaaaaaaacatctttgctcattatttcagcctgattagggataccatgaagggctattccattaggtcaggtttgcacagtaataaaaatgaagccagtagaggatctcgtggagctcctggtatgatgataagtctctgagtaacttgtaaatagtgcaattttatggaaatgttgcagctaagctttaaagtagttggcattagttgtcagacacagcaacagctctacaaaaggcaatacgctgagttcattttcaaccagcccaaacttgcctcagaagatccgggatgtggacaccctggtatattttttctagaaaagcttatttccttcctccagataaaggtgtatggtcactgaggtgttgtgctgacagaagtgttgatctactctctccgttagactgaagggctccaggtgtggccacactgggcttctaaatggctagcaaagccacagacgcatccctcttggtgtctgaggtgttcacattcctgggtctttcagatctgtattcctcatgaaaataaaacctctctacgacacactgtgtccttgtgggtttttagttttactagggagtttttgtttccttttgcttccctccttctttctgcttcccttctagttaaacctctttaggatggctcattagcaactcgttttgagtggtttgagctcttttgttcactgggaaacagatttatgaaatgttactattaccatgattgttatgtttttccttttatggcctgtccagctcaaggccccatgctttctgatactgctgataaggttttctatttccagatcaaattaaagcaaaccttactggccctgttactgaagctgtgcatgggggtcgtttgctgtgaggtgtttctatggctttgagccagggtatgaacatctctagtgttcatgttatttcctgagactagcactcacgggaagtagaatttattacaacctgctgtttgagttcatgaaaagtaggacaatatgagactctggggcagtgaaagacttaccaggattccttctggaactgactcgtcagctcattcatgtcttacccagtctttaaacagtatttcatgataatggtctgcttttaattgctgggctttaccttaccctttttgtgattgcaggtcctacaggtatggatctctggcagctgctgttgaccttggcactggcaggatcaagtgatgctttttctggaagtgagggtgagttctgcttttccatttccaccctcagtgttttgaaacaacactgaactgtattcgctacatccaagttttttggatgattttattaaaagatgcaagttttacatagcagcaaaaaggaaacttgacttagctttaaaatcagaaactagtaggacttttctgtggatgtttaggaggaatgcagtagtcagtcaactttggcatctgatgttttcatatcaaaaattaatactacaaatcatgctgaggacatttatgttgaagacaagccaggtctcttgttctcaggctttgggagagatattgaaattacactgaagggttattagcttactgttcactcagctcatctgtgactaaggatatctaatctatttccagagctcagaattcaggcttgttaatcatattctcagagaaaagaaattgcaggtttcaaatgaatttcacttctcactctctgggtgattaccatttggctaagttgaggaaagagacacctgaaatagttgaatgatatacccagaaattatgagcttccttccccatctctataattctccctcccttttttatatccctctccttgtagagaagtctcaatatgtttaaactatgtttcatagcagacctaactaaaacaaggaagagtaatagaagggaaagggaagaggaacttttctgtcagaaagaaaactgtgctctctaacgggtgggagacttttttttttttaatgagtacttgatgtttttccttgcctgggcttctacagaagaaagaaagaatatatttctcccatgctatgacactgaatttagttgttgctttaagagtgtcagactccccttctcaccattcagctcatgttggaaaacacagtttaacagcagacttagcgccttaagatgtcctccctgaccttctagccaaaaataaatccgtagtagtgagctgctgagggtgaccacagtcacttagaaaatgagaagagtaaaatatgttattttatctcttaaagcaatttaaaaatatttatagaaaagagtcataattgttggaaatattttttggtctctctggcgttataatgtcaacattatgcaagtcaaacatggagagaattgcaggctccatttcagcagcttttcccatggctggttttagaccttggttctgagccaaagaattgcagctgagatcctctgctgttccaaagtcatggtggcttaatctctcgtttcttcattaaggtgactttcactccactgggcaagatttgaggaatttaaaaaacttgtgaaatgaaaagtatggcataggaaatctttaaagaaaattaaaaatgcatccccagctgagagattagagctcaaattacattttagaactagaaagtctgcaaggagcatctgtttcagctgcttcgacattttactaaaactttgagttcctgagtgaagagaaaacatcactagttgcttttaatgtttgctttttgtttttctttttaatagttttgtttgattcatttatttgttcagggagagcagaatataagcaaatgcaatagtttatactaaacacaaatcacatatcctaccagtacttacgcataagaagtaatttaacaaagaagaacatttttgtctcttttttttttgtcttattgaactaaccaatatttctttttcctttggaatatgtgcatattccagaatcctttcttaaaatggtctaaggattaaggatggggcatgatgtttatgtaagaaggcatatgtaagcacgttccagtgtgtgtgtgcatgcttggctctgtgtgtgtgtgtgtgtgtgtgtgtgtgtgtgtgtgtgtgtgtgtgttctagttctggccacttatctaatgaatgggttcatgggttcagccaaagttactgcataacatgacatgggtcagtctcagataatatttatggaccatgtgtttgtttttctgccaggtctggattgtagccaaatcattttatttttattgtgtctcctattgaataaggcagactaaaaatatagattaaatttttaaaaagaaaagatactactattgaattcagtttgttcagtgaaagatgtggcattgatgggtaagtgatcttggaagcatcacctggagaaaagtcacccaggagctggtagaagatgacagacctgtatgcgtagggaagggtagcacttgagcagggattttcttgcttgggcagatgagcaattagaaatatactggccctgaaaggatttttttttattaaatctaattgccctgtgggaaatttaatgagaactaaatttgaacagtgccgttattgtgttagctaaagtgttgtaatagatgttttctgtctctcatccttaatatgaagttctcatccttaatatgaagctctatatctgctcctcaaagccagttacatagtctagaggagaattttttattccaaaatcaggaatgatccacaatgccttgttttcaaagggcttcacatggttgacctatcaactgattgtatcaaaattgctgctgctggaataatgttgctaatgagaaatgtgcataaagatctaatggatataagtattcttccaaggagtgcctgttataaattaggtcgtatatctctactatttcaatcagtctacccttgaatataccctttgacctcagtaacctaaggtggaagtaagcaagcccctgccttgtagttcagtctagctgggacatgaggaatgtcttgaaattaatgagagcctgtatacctttaaagtctagattgtgtgatgaagagaaatggtcaagatgccctgaaaaagaatagatcaaggtggactagaatagttaattcaacaaattcagtgtactgataattcttaagagcttcctattttcaaagcctgcacctatggctatgaggaatacattgattcttccctcaaggaacttttcatgggttaataaatcaggcatgtacaccaagaattacaatatcaggcattgtatattaactatcaaaatggcttgaatcacactttatagaagtgatgatgacgtgagggatacctcagctgtggtgaattacagcttcatgaaggaggttgacattgtttctctagagactagaatgtcaggtttaagattttaaaaggctgagaagaacagaaggctattacaggaataacttatgtgataaagcaacaacataaacagaagtgtacagatgtagatatgagatgtctatggacaacaattcattcacttactgtgctagtcaatggatggttctattttatgcatttaacattcaacaagcatttcttgagcacttacttcgtggaaggcataggattaatttggccagggtgtgtggtacataggtgctatatttgtaattattccctttggaagcaaacttaggtcagtaggtttgagtcaaattatagaaggcccagagatagcaaaggcattatggaaaaggcaagacttgctgggcccttgaaaaatcggtagcatttggagaggaagaaaagaaagaggaagtgtatgccatatccagccagtaatagtcctcaatattggaggccagacaaaagcgctacctgcatgatggaatagtgtgtgtgtgtgcatatgtgtgatattcatatgtaacatatatagtatctacatgtaatattgatatataatatttacatacaacatatttatatttgtatgtgtgtaatacatacactatatgtacacatatacatatacatgtatatatatgtacactatatgtatatagtatatgtatgtgcacaccagtgaggtgtggcttgcaggcaaagcacataattgacatcactcaaattctgcaaaaggtgttatatcattctgtaccattcaaagtaagagacttaggaatgagatgccacatcctaagggaaccaagagccccaaaataattttttctgtatattttgaacatttttcataaacctatgcacactgacaaaacacttacttgaaaggaaagacacccctgttctcattgctatcagacagcaacaatttattttttaaaataaactctattccaccacagttgaggttccacagagctctgagaggatgtcaagacatgtcagatatatttcacacaagtattagagtcatggtttcagttagtaaacagtaatgaatgcatctgttaaatgtgttcaagaatgaacacttcaaggctttccattcacagtgaaggtggggaaaaaagccacagagcttttgattgctgctgtcttcaccataatccagaggcaagaagaaatcttatggtgtgttctagtgcaatggcctgcgtccatgtacatcagcaatcctctgtccccttgtcctcctgatattgcagaatttatttgatgttggagttcagcaggtcacagcaagctggattaatctagatggtgccaatgtagataatgacacataaaaagtctttcaagaagcttttattaagtcattttacagattcaaggaggaatttcatgtatttatttatttattcattcaattttgcatgcatgcatttattcatttttttgttttagagataggaacttgctatgttgtgcaggccccaaacagttctactagcttcaaacaatccttcttcagcctgcagagtagttggcattataggtatgagccactgtgcccagcccaaggaagaattttgaatgtatattcctgcttttaaggagctcacagtctttagaagagaaaacagagaaataaacataatttaattgtgatcctcttagattattaaagggttttaatctaggtaataatactgttagatttttactttgtcagtaatactagtaataggataaaagtgaatttgaaagggatgaattagaggaggaagttgatgacaataggtcaggagagagataatctaagtgtgacagggatgataaaaaatagatggatcacaaacacggggatgttaagaagacagaattaccagtactcagagtctaattaacctgtggatttttgactcggggaactatcagtgccttcttttccatccatttctaagtttctgcatttttaattaatgtgatcatcagcaatgactcacgtttaatgcagtgaagtcctggtgcacagttcagcctattagcactaaagtggcacttgcacagaacaactctgtaggggaggaaacatgctgaggctggatgacagcagagtgtctaagctacgcttcttttgtactatttctctgaactcctcatgcctgtgtctaccctgggtcctgcagctgtctgctcagctctgcagtatggctgtggtatggctcaggctactatgcagtgagggtctacagcaaggacaaaggtctgaactccctcctcattgtagtctctggacatgtgtgactctatcccaaaaccttgacaatcccccagatattttgtcattgctagagtatgtacttactcatgggatacaataaaatatatgcaggatgagttgagaacagcagagccatgtgctgggcagagtctgggaggttggttaggctcccacggaaaatgagtgacctacccctacaaagaagctggcagtgtgagtgattagatttgtgccacagctaattagtaaattgaaggagtgggaccacccaagaatactcagaaccctgaatgttagttaaattcacacatgccagtgatagagtatatttctggtcttccgccttagatgccagctcttacgggaacagagccagtcctggttatataatagaatgtttccacaccactttggttcagtatcctaaattgtggctcttgttatggggtagacaggaatgaggttgacataacgtatttggtgtttggtgatggcaaagagtacctgttcatagacacacctggttgtccacctctggctagagaccaacccaagttcaactgtgcagaagtccatgttggcctttactggcccagccagcctctacctgagatcattccctacaacaaggggcccaggattcctcagtcaccccagcagcttttcccaaggaaaaccatctcatgaagaatttgccattgatgattttctcctcactgtgcatcgaagtcaatgggtttattactgagagttggttccttttaaaccttaaccttacactgtatatgatatagaactgtaggcaggccagggtcatcaataaagacatttttggggcctctacttggcttgtaaccacctgcttatccacagtactgtgcacctagcttgtcatcaggcagagtcaccagcagccacaacaaaagggtgcaccttcgtcttttccaagcagcaggcaatgtggctccattttaacttttctggcaatactcacatggattgttaaataatgctgtcaacagtgtcatcttcaaacccaaagcaaacttcctcatcatctgtagttagcagcatgaagacggtgatgatgtgtaacataaacacactttgaaatctgatgcaattgaccctacgaagagagtattccttagtgccctgtctggcaacttctggacagaccaggaggccttggggcttagagcacttcttcagcctcagctgcaaatccattttttcttgtcccttgttcccaggatgaagccacagtgtttcatcaggtacatttatcaggaatctctgtttctgtttatataacaatttaacttaagcctcaaccttcacagtgtacgcatcacatttccatggaaggattgcaggtattagaagatggtggatcatgtcttaaccacaggggaaatgtttcaggatgtttttatagaaactttcactaacaagcaggacacaggattggcagagaggtgggggtaggaggcaggtgaagggtggcatttgttgtgtttccctcttctaaatgaagttataatgacatctgtgtttcaagagtgtggcaagtttggactgagcttgaaataaatacagtttaattggtttcaaataactgaacaaaatgaccattccatgccctgtgtaataaaatgttatagaattaaaacttattagacgttaaaatccatgaaggatattttgctggatgcccatccttcagcattctgatgaggatcttcgtgtatttgttcaatgaataagtgaatcagcagctaaatcctgacctttgatttcctcagttctctcctgcaattgtcactgatgctctcatctccagtcctgagcaaggcaggagttgaattagtatccccttatagtgggaggggtctagaaatagctgtgccactttagaagctaggctttgtgggcttttccgggggatggaatgatttcattttcctgctttctactccacataccaccaagatcagaattctgccctaaacactaatgtgtgggagcctgatgtcctgcctaagtcttgtcaacctctttccaggtgactgaactccgaaccccatgcaccagtcactggccaacattctgcattaagtgacccggtcacccagcaccatccccctgacaccacctttatctctacaccacctgcctcctgcctgattaaatctcctcaaatattgacagacataatgatacctgaagatcccaaatccaaattttctttgcccctttggacattgaactttagattacaaaagaccctgactagggatcctgtggatagctgagtcaattttcttagccccattccttaaatatcaagtctttctaattttccaatgagagcacatgaaactctcaaggttaaaagtcaatttatattaataaaatctttaatttcttgatttctgaatatgaaaaaatgatactttgtgtattttttaattttttggcaaaaccttccaaatttgtggaaagagaaataatattgactactggataaccatgtgctatgtgtaaatattaacggattcaccttagtgggcactgacttgatgatgtttgccacattatattttccagagccttggctctcccaaaaaatgagaggtcatttttcaggggaggaccattttgtgtttggctaacatttaggacatataatttcttctcctctacatgccactgacccactgcatccctggttggagcaagaagagccatgctttccttaataatagctaatggtgaaaggatgtgttgtaacaagagcagaggaatagggaaacaggagaaagacagtcagttgaagagtcctgccctgtgtcagggcaccgtttggccagctgggcttgctaggagtagaatatagaaagtacatgaagtgccatactcagacagctctggctacgttgacaaactggtatatcatggtgcccaactttctttgttagctgggccagcatcataccctctagtatttgctctgaacttcgtaagcacggttgactagctttcttttcctctgcagttatcattcagactgaatagtttctaagaggctcttaatgagaaatagaaggaagtaagttaacttctgtgcataccttggccatatttgcttgacaaactgatgtgtatactaaagccattatgggtgtgaaaggcaaaagtataagtgctccccagtatgacctggctattttgtcttacttctatatttgattgctaaaaatatatgttcttgggtcaaaaaactcactttaagggaaaaaaatggaagaatattaataaccaaaatagaagaatattaagaactttaacatgagatgtatttagatcaaaaccatctctttttggatttttgcgggtgatttctccaacatgtttagaactgggttgctattcacccaaaggtggaaacttttgatgttggggaataccactgatgccttaaagcagagggtaaaaggaaaagactgaaattccaggctaaaatgaggagagcatggccaccactgagcccaaggtagcattcaataaatactatataaattactgatttatttctacagttggttgatagaagcttactatgatctgcctaagggtgcatcaaattcctctggtacttatcctattcttgactatcacttccttgggggcagcagttaatcaggtagaggcttatcctgtcaagagagtaaagggagctatggaggaactcgctgggaggagaagctggtcctcagagatgcttagggtttaggaccagtaagaggcagtctccacaccacccacatctgattcttgtctccttcttctctgctgtggtcaggagaaacagtttagattagggatttcagagcagtggtgttgaactttgtcaaaactgcatttgaatcccatttatgaattgtgtgatttttttaaggttgagttccccagaagtaggatgctgagacaaggattcctatgaaagtgaattattagaaaatggtccagggagaaagcgataggagagtcagaaaatgagacggggaaggtaaagaaaccagacaaggatacaatatcaagtagaatccaacagtggtgtgggtgggtagaagtatctgtctcagcagattttgagttgtccagattatcctcagttggtggttaaggttaaatttgcatcctcacgaggatgcaaatttctacacactatcagttgtccaagtgcaggtaaagctggctccagcagcctgagggcagccgacagagagacacgggtcctgggtgtgggagtgaaaccacacatgaagcctgcatgtaaaaaaaaaaaaggtaaagaggggctgggcgcgatggctcatgcctgtaatcccagcactttgggaggccaaggcgggtggatcgagaggtcaagagtttgagaccagcctggccaacatggtgaaaccctatctctactaagaatacaaaaattagctgggcagggtggcgggcacctgtagtcccagctgctcgggaggctgaggcaggggaattgcttgaacccaggaggcagaagttgcagtgagctgaggtggtgccactgcactccagcctggtcaacagagcaacactctgtctcagaaaattaaaataataaaataaaataaaataaaataaaataaaataaaataaaataaaataaaataaataaaataaaataaaataaaataaaataaaataaaataaaatagtaaagtaaaataaaataaaggcaaagagatcaatctacatcaccaaagcactgacagcatctgctacagtgactttggtagtttcttacattctctgagcctcagttttcttatctcttaagtcagaggaaaatgacttgtttaaaaaggcttcaatgaggtaacacaagtaaagcatgtattgagattactacacaggaaaagcagttgctgaatacaattagtcaactggtaattggtaataattatgtaaaattcctataattatagggagcgctatacaattattatatataattcctataattggaattaccaataggctaattgtattcagtaactactcttattgtcctcaagttgagttattattgcaagccctgagggctgaataaacatgcaaactaaactgacatgtagaattttatttataacaatatatgcctaaaagaagcggtttatttgcacaaggaaattttggaagctacagataattttaataatgactacagaaaactatcttgaagatgtttctaatgtttaagacataatagcataagcctttataaaatgggatactgttatgtagttatagttgtaagaatcagtgtttaaaggatgggtttgatgaaattgtactactctagttcctgtgcttctaataaaattaaatctgattaatacagcaagtaggtctttggtgagttgattctgatgctgggagtgattttcttaattcttgctcagaaagccatccatgagaattaaatgagatagcatgtacaatacctggtatagttactggtaagaggttttcagtagagaccaatctcctctttgtttaccttctcatcaagagaggaagaacaaggaaaattaggttgcttttttgagaaaatactttaggccaattacaattatctgaaagtagaatgaatttctaggttaggcaagactagagttaaaacgtgggtgtgcagggctgacctgccagggtactctgtatggaagtacatggaaatgtatgcccaaatacagcttcatataattgttttgatcatacacagtttccacatgagattatatttgaatgactaattcagcaaatataaaaaaggagaaaaccagtggacaagatgattcctaaggttcctttcttcctggtctatgccctagtgtattatgaattgatattcactggaacacacagttactgctggagattgagttataaaaacattcaaatgggttactccattatatctacttaggaaatttttttttaaaataactgatagatgttcagttatgcgaaacgaaaggtatttctggctacccctttatagttgtgtacatgactgcagagccatcatttcatgcttacttccccacattcatgtaccattttctcaaaggaaaattattgaatgaacttgctagttttgattctggggtttgttttaaacaactgatatttaaatccacctagtcctctttagctgttctcctaggaactttaatattaacaaacagctgaacttatacattttgtaaaagagttcagacaatgaattcattcttcttgaaatgcatggaagtacccaggtgctagctacacccaagagccttttctaaatacaaaaaggattgacaaaccaagcattcatcctgtctgcgtccaacagttcggaatcaaaccatgaacttgctgttcctctgtttgtggttagcttgtttgtatatttttaaggaagatgattcaatgcaagaagtagttttatatagtacgttaagtaaatttcctatacgatatacttaatcagaaaaatatttttgaactagagctcacagaacatatgattacaatagttttcagaaagcaaggggctaaatgaggatttctcaaccttggcactattgagattttaggttaatttatctatggtgggaggcgtgtcctgtgcattgtagcatatttatcagcagttgtgacctcgtacccactagataccagtagtcccccttctcagttgcaacaaccaaaacaactatagacattgctaagtgttctctaggggtcaaaatggctcctgcttgagaaccacagtctagatctggtagttgcatattgaactgacagtccccaggattgttgtggggatcaaattagataaaacttgtttatattttttaaaaagtaaaactaatacatatagttacattacacctcttcttttcatttgttactcatctaagattttttgagccagatgatggagacccataaataaattaaccttaagaggctcaaaggtttgccaggtaaacaaagagttagaagaaaaagagagatcatgtcagatgtgccttaatgaatgtgtgtgtaacatgtacaaaaagttatgggaaccccaagaaagaaaagactccttttgaatgaaatcagagaaaaccaactggaccatacagttgaagctctataacaggaattaccaattaactaattgtaactaaatactcttttatacaatgtcatatattcatgtagtttttaaatctagaagtagttaaggttcataattgtcatttctcagggacactactgaagtggtatcaaatctaaatgagcaacttaagaattgaagttgtcagacagctgttaattcccctttttcatacctgctccaatgatagccaacaatcaaacaaaaataataaaataaaaacgaaagcaaaaaatacaactcagatttcactacgtacagcaataaatatcagagacattagggaataataataggtcaaagcagaaattcattcctcagcatgttcttcaagtggaagaattaggtctgttttagttctgttgattctaaaagaaacattcaggctatcaagaaaacctgttttaaactctaaatctgacactatagatagatagatagatagatagatagatagatagatagatagatagatagatagatagatagatgatagatagatatagatagatagatagatagatagatagatagatagatagatagatagacagatagatagatataattctgcctaagtaattatctgctggtaccaaagagattgacaaagagattcactaacctaccagaatttcccaaccttgttccagggtattctacattaaatactcattaccaaggaaattccacataaaagctgtcatgcttgatggagccatatttacatgaaacgttgcagcattttcttctttaaacctcttctacaatttgaccaattccatgttccagggagtactcagaggctgattaggacatgagttgttagcatgtgctgcactaatggttatgagtcacatttgttttggaagatcacccttaaagcctgtcactcatgcttgtttatgggaaatacaacaacttaaacatcagttaacaaatccccatgaatgcatggtcatatttgagtgcttctaacaaatgcttcctttcatttctcccttgacagccctaagaattaaaggctggtagagcaaactgggagacatccatgaacatttattaaaggaagcataggagagtatgataactgcaaagccagctgtttatattattggtgtgagattaaatttcatcagtcttaaaacctgctttttaccactagagaaatcaatctgccatatttaaggttacattaacgtggaacattccacgtactgaactgtcacatgcctttaaaataaccatgccatgctgttttttttttttaaaatcattacacatgaaacaaacagctgacaggtggggatctattggtatattcaagtttttcatgtgaaaatttcccccaatattagtggtaatcacaatttgattatgagaaacaaacataccatatataggcagaactatatatcagtagcctttatatttgacagctcactgtaaaatccatactatgattcagtgaacatatttatgtcttatatctgggttgatctggttgccttcagctttcctcacttgaaaaaactatacttaaaaaactgtaatttaatgttaaagttaattaacacagcaaatacttattgatgacctattatttactgggtactattttcggtgcttgcaatgcctcaatgaacaaaagagataaaaacctctatggtcatgctgcttgctttagtgagatatatgtgtgtttgtggggtggaggacatgaatgtgaggcagacaataggctacaaaaataataaattatctagtattttataaggtggaaagagctatggaaaactgccccatttgttcctcatctgagtatacccaaaagttgatctttaatattttatatgagtctcctaggttctaaatgttagaaactaattaaaaataaattgaaactaaactaaatatctttgtgatctctctggctagaagcctcaggaccagtcctcactgtttactgatgaggaagccgaggcccagagaattaaacgatgtagccaagatttcaagcagttactgtcagaggtaggaccaagacacacaacctccttctctagtgtgtttttctcaatcggttggcatttaacagcaagtgttttagttgaaaaaatttatttgaaaatctgtttgaaacatgacaaaataggaaatacctgcttattccctcactgcagagtggtcctcagcagaaagaagattttgaagtttatgaattatgttcagacaagacccttataaaatcactctcctctctccagtggcagaagcgtggcccctgactcctcacccaccttcattcatctttcgtattccttgaaaattaccactgagtattttccttctgcttcctgcagcaccagcagaaaagatgaggatgcgtctcttgattgccattacaaatctctttcttatgcttgtttccattcttattctgcacataacttggacttggccatcattcttagagctcctctaaattgtttgattaaaagattgtttataagtccagagtcagaacggaattgaaaaggcactgcacattatgatggagaggaataaactccagtcaaaagtcatggcttctggactcaccaccctaaggcagcctcactggaacttgcttttccaactgtcagtggagttttagaattttcctacttgcaagcttgttgtgaggattaaacggttaagagagattgtgtctgttatggaattgtgaaaactgtaagttgcagtccacactgtagaaatcttagttacctctgccctttctttctctagagacaggttgctagtggaatagacaagtttgccattaatttgaaggttgcattaagcatatattatgttagtgaagttggtcttctgaaagttggaagggacctcagaggtcctgtattagaccaactgtggctgttccttagaataagctggaagttttctgaaaaatacaaattctgaagcctcatacatagagattctgatgtggaagatctggaattgatggcagcagcggcccatctggagccgctgctgtgaagatgccggctgtagtgggggaggtgcggctgtggttgtgccctccacagagctgccaggtgggaagcctgacccttctgagttggcaggtctgaagcccagtgctcttcaggcacagttgcagctgcccatctgtgcctctagacctgggcatccccgtgctctcgggggcccaggaagcaccccctgctcctgcaggcttggaagtgcctgctatcactccctggcctctccctgcacctgcacccagcacccgctccggggtgaagcaaagtcatggccaagcctggatgctgtcatgacctggtcaggtgtgcacacactcggagcagtgctgacacaccagccccctggcacataggcactctctggactttggacaccaaccagcatgggagggagactgagagggcactaaggggtggttcagcgcaggcctgcaggcgccccttggcatgaacagcctgggtgctgtggatgacatgtagatggtggcagaaggcagacaggctcctgggcagaaagaggccagtccccagtgaagctccaccttcaagccagggatggccggaagccttgtggctgagctatcagttccaggtggagtccttggctgggagtgagaacttatggtgctttatccaggccttcccatagccacccatggaccaataagcacacccttcctcccttctgatctcataaaatccctggacttatccaaactcgggcagatgtcgggatgacctgcctatggataagagctacccacttcaggtctcctgagaactgtactgtcactcagtaaagtatttcttcaccttgctcaccttccagttgtctgtgtatctcattcttcctggatgtgggacaagaactcaggacccacttaatagcaggactgaaagagctgtaacacgaacagggctgagacatgccttccctgcccaccacattgtaggtgacaagaacagaagagctacagccctttggggagcccagacctgtgtgacaccctctttgggggctctgcggtttctgtcatctccatgctcccaggcgtcaccacattcccctcgtccagatgcagttgcccacggtggaagccatttgcgtacatcagatgcagccgcaggcttgcatggagctggtgcctgtgctggtgcctggagctgctcaccccaccacggcagctggtgtacctggctgtacacagtggctgaaccccatgcttacccactcacgtatccctcattgctccacgcctggcttgcccttggcaggcatggggtccaggctggtagcgcaacccgagcatagcctaccaggccgttggcagaacaagcccattgggcccgagcaaaacttgggcaaatgtgccaccagccacaaaaaggaaacacaaaagtttccagctggaaaagcaagacctgaagaatcctgcaacagaatgatgctctggagtgttttctgtgttaggtgtgcttgtttgtttgactaaacctccaaacatgagtctgaagattaaccagtttgggaagccttgcttcagctttctactgacattaaactccttctcctctcccatttctgtcttcacttagaaatggaaacccactaattactcaagatcttaccttttccattcagtcaactaggcccttgcacccccattactttgcgttccaccttgacaattgctattgccaaacatcggcattaatctattttgacatcttctttccacctgctgccctctagtggaagtgctgacaagcagcaaaatatttaactgggaacagcaggaaagtgaccagtttgagctggccagttcacacaagtcagcgcaggtccccagcatgatgtctacagactacagctatgccagaaatcgttaggatggcctccagctgtttggacactatttgcacacaagttacatttagagcagaactttgtaaagaccctggcatttattcaagggctttttaaaggtttcaaaaatctacctggaaaacattacccttgggatatttttgtttctttgtccctcattttcttcttttgtcatttacccaaattcttcttcttgcaaaagaaggtggttctttcctgccttccctaacctttgaattttccaaatcttgcaaaaaataaagatatatatatctttaaataaagatatatatatatatatataaattcttacagtttagaagcttccagtcaccaggtgaaaggaattcacatgaactgaaaattgacaatgtaaaggacactgtgttctcctactgttcctccaagtctctttgcggtccgttagtagtcttcttttttccaggagacactgaagttaagagagtttaagaagattgtagtatgtcacaaagcaagtggaaaagctagcactagaactcaggtctggctgatggaaaacccttatgtattttttttaatgtgcttctttggtgtttagtgattatttagtcttccgtgaagtaataaataataacttgcatggtaaatgttattaaggctcgaggtactaaatttatagcaaaagtcattcagcttttttttaaatgaatgtttaataatcagtgtgtctctgcataatctccaattactccttttagcagaggaacatggcaggaatgcaggtaagtttgggtgggaggaaaagacagcaaaagccacagcactgatgcaaagttgagactagatttcacagggcagatgccgtatactccctcaagctttgaagaaactaaatagttatctatgttaaccaatagggcagaactcgtactccaaacaccgacataaaccgtgtgtgtgttttgtgtatgtgtgtgtcttcccccacagcattctgcacaattattaaccctttttgtgtagtggtttttcataattttatccttgattgttaatatcatggtaagtgatgtgttataaatatatttttccttaagtatcataaacaatctaagatttcatttggctgatttttcttttcttagtattgcatatcattattgctgttagaacactcatacagattattcagcttcttaactagaatgtatacacacacacacacacacacacacacacacgtgcatgtacagaactgccttctttctctttgatggtagaaaatacagctctctatagtaagcaaatttgctttcagtctcagacatacccttcattctctgcatgactggtaaagagcggaaagagtaatacttaggatctggattccagttccctgttctctgaccatttaaaaattttgttaccttggccaggtaaatacagttctatgaacgtcagttgtgcctcaattgagcaggcttgtccaaaggattcctcaaggatgaggtatcctttcagctgtatgagctgaaccttgatttgtgcaatagtttaagcccctgaatagtcagataaaaatcatgttaattaaaattaaatagctattggtaggatctggttttccactggcttgcatgaatgatgttttgccctcctttctgatactcagctcagaggattccttccattgggttttctttcttgtagtttttctggttcataaatagcctatagacaaacactaaactgttacaggtaaaaggaccctagattaagccttttataaaacaaatagtcctgtgtaaataatgacatcttattttatgtgtgtgaatttgagttttaggatgtagggcatgtctgactagatagctaaaggctgagctccaggcagccagctgctatccaatctccacacctggaatgttccaaaaaacctcctgtgttttctttctgcagctaagcactgatgagcaggatttaagaagtacagccacacactttttgctgcacgttttttaaagtttgttatttttgtcatagattacttgttttgaatcaaaaatttttaaagaaaacttaatctcccaaattttaacccccttgaagtttcaggattccaaggaatatttttattttaagatgcataaaatactcagtacatgtacaaaggtaatgcttataagaaacttagaaaaaaaaaaggagctagtaagattgagaaggggaagaatatctaagctaacattactaacctggcaactattataggtggctggatagcatgaaggcataaagctgaaggcagttaagaaaatagactggatttgaatcctggctctacctggattagttttgtgacctcagagaagttgcttcccttctctgtgcctcagtttcttcatatgtaaaaggagataactatagtgtctaacacacagaattattgtgaggattaaataagttaatacatataaagaaagtccaaaactatggcacacaaatgtttaatatatgtaagctattattgttataaaactaaagaaagagaacccagaagacattcagtttggtgggattcagatatatgttttcctttcctcctcctcctcctcctctccttctctaaccccactatgcttgcctcccaatctatccctgactcctatttttcttcctcccaacttaagaattgtcactaaaaatatttagaagaaaagaaaatgtgcatacttcagggggtgccaagcttttgggtaaagtacacttttcagctaacatgactgtatccaacagtaatgggctttatggcaagaaaaagcttttttctcaataaatgggttttaactttgtaatggattattctctttgcatgggtaattcttctggaagatggaaattggctcgatgataagataggacagttggatttagggatctagattaagggactatcatgtatgcttttaggagagaagtttaatctgcaaaacctacttgtcttatttaattaattgttgctcttagctgctcaattttgtacaggtgacttgcatgaaagcaaaatgtatgtcaaaatccaaaagcagagtgaagcctcgggacttcagtgcttttgggtgtctttccagacctctgctcttcccccaccctcaccaaggccccactgacctcaaagggcccttcttgccaggccgtgaattacgtctgagccagagggctgggactacagccaaagccaaatgaaggtgcagaatttaggactaaaaaaagcctgagcacgtggcactgggtatagcagataaatttgttggagaaatggtttataaataacatgaaaagggaaaggggatagagggtcaaaatattgagctgttgagagttgttcaatatttgaggtcagtctcaccatttttaatactgaacccaaaagtaatacacactgaaaaaaaaaaaaaactcactgaataaaattaactacagctgggcttattttttcttatcaagacatttgtaagtttggcagcaagcatttttaaacaggatctctattatatgaaataaatttaaaaacatgtgtctacagtcaggacaaacaagtgaacaaaaacaaagcaaaagcaataaagaagccccatgaaggcattatgcttttctgaggacagtataaggctaggatactgcagaaactgaaatacttagggatcttattgaaatagttttcttttcctccaaacaaagcaaccatctcagagggatagatgggctaaaagacaaggaataaagtaaacagaagattggtaacttgggaggttttcttttcccctttctctttttggttttgatttgcttttcccttgttaaagccagaaaggataaattttggtccagaactcccaagaccagagggtcagggaaagccaccccgaggctggaagctatgaacttatcgctagtctaaactccacctccttcttccctgggagtcctgcacaaatataactgcctgatctttctgtttactggcaaaggttttgctcccttctctttcgtatcggaatgtgaacttggggaaagatttggggttttttttgttttttttttgtttttttaagaaacagagacttgacttattcctcccacaaactcttaccctggcacagggagaccacaaactaagtgaaaacaaggtaagaagcttagagaaatgggaccatatgccctccccggagctgaaccgtgttccctgtccaccatcaccttgtcttcccatgctactactccactcctgtctcttccacactctgggtcacatgtctaccccttactgtgagttataatcgcccaggaagggtaacccattgactgagggccaagcttctgataagtgaatgaacttgtcttttctcctggccagatatctgtctttgccagagagggctgagtcagggagactaagattttcaaggtcaaattgtatattgtttaaaattgtgaaaatttgctttgtgcattgaatctcattttcaaaataaaattatgccttaagtcagatcatactgatgcagattctgcagatgttaagaggcttccatgattgtatttgccagctgcaggtcaggcagtggtggatggtggtaagaagtaacctatacttttggctgggagctgtggttcatgcctgtaatcccagcgctttaggaggctcaggcgggcagatcacgagatcaggagattgagaccatcctggctaacacagtgaaaccccgtctctactaaaaatacaaaaaaattagccaggcttggtggcacacgcctgtagtcccagctacttgggagactgaagcaggagaatcgcttgaacctgggaggcagaggttgctgtgagcgagatcgcgccattgcactccacactccagcctgggcagcaaaagcgaaactccatctcaaaaaaaaaaaaaaaaaaaaaaaaagtgacctatagttttgcagtagaattttgaattcaaactcaggctttatattttctccaaagtaaattgtattttgttcattttaatccattggttgactctaatgagatctttctgactggaaattctgccctttttttcctccataactgtattaccagttatctctcatccatgtgtttgataaatccatatgaatgtctttttttgttttctaccaaaacctttataacaaaacaaaattcatagctttgtcaactacacttgaaaattatgccccaggcttttcaggattctgtaattaacttattgagtcatttgtttaaccattggtgaattcatttatctttactcgggccacagtaatgtattttacttacaacatattatgagaaactacatcacctgcttcaccgaaattgaaaaacattagatgaacaacactgccctaaaccatatttcaataatcctttcatgaaaggaaaggaagtacatttcctataatgatttgttcttagtgaagccatgttgactccaagtgacctgttgtttcctttctgggctcatagaaataatctaaccattctaaaatattgatggggattcaggtcaaaggtatagttttaaaaattcaccatatttaacctgttaaacattcagtatctcctaccttctgtcttccaaaaatccaaagaaataaccatttattgttccgtttatgctttcagtgtctaggacatagctaatctgatactgaacatttgaacttatcgttagctttgaaaatatgccctattgtcctattggctttatactaaagttttattaatacattccctcaatagtctccagtctttgcccaagaagaagaaaattctgtaagagtttctttttaccttcctttcttctctgagtggaataatcttttttgttgtcttcatagtattttagagttttgtgagatcagacaaaatttacctcagcttataactttatcttttaagtggaaaaactctgaactattgattattgtgtcatcttgaaaaaatagtctatggaatatatataagtagttgtgttatttttttcagtgttaagttgacctttttcttttagtgcattgtgaatatttaaaaggtcatttgtgcaacatataagaggattgacaggtttccatgcatgatgcttaatgtggagatgatttctttccatcaagttattatgcttggaataagtaacacatcttaaaattacaaccttgatgtagcaaatcatcagatgggttaccattacatggaaagagccagtgaaataaagaccattaagttcaggtagacagagatggcggtgagaaattcacagccaaagagggccatatggaggtgaaaacactggtaaatggctctgggaccctaggagtctacagtaagtcattgggaagttggagtggagaaaggcaacattagctaggtatttcattcattcctccataaatgcttattgggagcatgttgtgtgcctggcatcatcctagcttcactgaaaagaatgaggaacatataaaatgtgaaggtgagaataagtgagaagtaattgctctttactctcaattatagctgggcaagtacatatatgaatatgcttttgtgttctgaacacacactaagcagttggtcaaagtattaagctagagacaacttctactttcaaatgtagtgtttcaaaataataataataataaagatttcaggacagtttacatataaccatttagagatttaaggattaaaatcaggagggaaggagaaatgtctctgctggggaaatttttttaaactagtgttttctactcagctactcaatgtgatttcttttattttcttccttccattgcttattggcatttattgtggggaagactgctgtgttggcagcatgagagagatgggaatcaagaaaatggaaacaccattcaatattcaaaagccactatccccttaaaagcaaccacagatcattcagttttgccacatactcagattgcacactaactggaggatgttaaaaagtgttctattacaaccagttatccagtttttgccacttaaactctgctgtgagaaatgtgactgtagagcagccttaaaaagagatcatcttgatattaagcagtgttactcatacatgcttgttgacattctaacaggtgactttgaatggatcttcaggctcagaaacatggttgtgtccctagaactggtgaggctggaacaaggtgtacagaagtgaaatgaccacttgctttctctattggatttctttatccagctgtgcaattgtttcagggactacagttgattttcctgatgcaagcctagcaacttgtttttcagttcagcacagtaaaatatgaacaggagagaactccctgttggccacccacctcacaatctttaaaagggaactctgtacagaagcattctgcattaggcaaatgtacacttctgcaatcaaaatgaaaaacacttgagctgaatcgtttttcgttagctttagtttccagccctgattaaaaagaacacagggaaccctgcaagtttaagcggttttggcagccgaggaaacagctgtgacattgtcaagggttgtctgtaggagctgtgcaggctgctgacagcactgataatgcccagaaatggggcagacgcttttcgcatttggtcatcaaaggagtggcagcagctaggttcaagaagtgaacttttgaccctgtctgagacaactggctctcgtggatcttgttctgtcattctccagtctgattttctctttcagaacaagtgggtaggatctttggtttttaaactgtttgactgttattaaaagtaagctagttcttatagctgcgattggaagggatggaaggtgaggaagaagagctggtatttcccactatcctgcaggggtggggaaatctatcaacgactgttccactaatctgcggatgagttatctagggaatatcatgcagttgccaaagttttcagcatctaaaagcctccaaagttctctctgtgagggtctacctcccctgtctccagatccttcccatgcccctcagactcagcacttgtccactgtccttgctaccagggaatccctctgcagcccccttaccctcctgcccctcccaaaagagctccagactttgacctttctcttccacctcaacatctgtttgtgtcttaaactgatgtccattgaaagaaacagataaactaattaatgctgagatatgacttatgaagtattatgaatgtgctaactctctcaggggtatgtgcattttaatagaggaccagcagtccaaaggccggtctcactccactgtgcccctctaacagcaccgagtctatttccaggcagccagagaccaggcctgagaacttgccccagaccaccagcgtccccactgagaaagcaagcagactcaacagtttttcagtgtttcagggagcctgcagcagcaatacagttccttcaaagggtctgtggattctctcagctttcctagtaggttgctgtggtagtttttggagcaaaagttcacgatgtgaatcttcacatgctgctctttgtgccgagcaggtgcttgcaagctagttctgcccctatctgccatcttaatcctaacatctcccatgtttttttaatttaacttctattttggtttcagaggtacatgtgcaggtctgttatatagataaattggatgccatgggagtttggggcatacatgatttcatcacccaggtaataaacatggtttccaataggttagtttttatgtcctcacccgcctcccatcctccacccccaagtgggtgccagtgtctattattcccttatttgtgtttatgtgtactcagtgtttagctcccacttataaatgagaacacgcagtgtttagttttctgttcctgtattagtttgctcaggataatggcttccagcactatccatgtggctgcacaggacatgagctcattttttatggctgcatagtattccatggtgtatatgtatcacattttctttatccagtctactgtcaatgggcatttaggtttatcctgtgtctttgttattgtgaatagagcctcagtgaacatacgtgtgtgtgtgtctttatggtagagcagtttatattccttggattgttgggtaaaatagcagttctattttaagttatttgagaaatcttcatcctgctttccatagtggctgaactaatttacattcctacaagcaatataaatattcctttttctctgcaaccttgccagcatctgttatttttttgagtttttaataatagccattctgactggtgtgagatggtattcattgtggttttgatttgcatttctctagtgaatagtgatcgtgagtattttttcatatgcttattttccatgtgtatgacttcttttgaaaagtatctgttcagggacatcattcctatgaaaatgctagttaattatacaagtattacttgtttccaataatcgattttttaaaaaaccttataatcaatattgcattaaaattttcagctgtgtgattccttatcattttcttggatgcaaatgccttgtgtcacgtactatatctcataaatctatattgcatctaacaaagtgctttgtgtaaagtaggcaattaataaatgcttgtttaatgagtagatttgtttttgttttattttgctttctatgttttcctaaggatgtggggcattaggccaatggaaactgtctctcaaaagttcttatatataaatattgatgtcaaagtcactatttttgtacaaataaacacatttacctaatttggtgagcatttatagagtcctgcctatattcaaggtccctgtgctgatcagtgggcaactgaagaagtatgaggcactgttactgctgtcttccttccctaattgggtcctataccttatcttggtacagctacctcctaaggaggcccatctgtgctgttgagggtacatctgaaggcagtgcactggaatgtatagcctaggactggaatttggagtgaggccctgagagatcatacacatttttcacttgtgggggaatgtccttaagtagaaatagatggtgatttcagatatttgatccaaacctaacttcctcatttgaattgagtatgctaataactattcttgaggctctggaatagtgatgacatttcctggttgggaaatcagatgctgatttctgaagcagagttttaaagttgaaagatgaaaagggaacaaaacaataaacacaaccttagactgaagggtcatttttctagtccaacttccctccacctagctgccacccaagattgtccctcagccatccttagaatattaaaataaatccattgcagtgctcaaatgacttgtttctatttgaaaatccttgccattggagaatttttctatatatcttaccttaatggctctccacgaattttgtcaacagtttgtcagcaatgtactcatgaaaatatctcatatctatgtatattctatcactttagcctccttgacttctagaccagcagttcccaaacttttcaaatgtgaccccttttagtatcaacttctgtttataaaagtacaaaagccctcacatcttatactttcttttatgcttttatttattgagatattagacaacacatacttgtaggtgacatggattcttagatctaaataactccactctccatggtcactgtcacttcaacacaggttgatgcagtccttagtttggaaaacagttttggcataaataatcccaaaccttcctatcacttcttggagcttttttcttcatgctttccttgcatctttcttaaaatgtgaagactacattggatatattattaaaataatgtcattattagtgctatgtttaaagctgaccttttcttcctagccactgatatagcagtgccaactgtggactctctttagaatgaacactttagtaataataagtccttagaacacaaacactgtcacttgtaaaacacttttctatacttggtaacctacacagaacagcggttcccagactttttcttttttttgtcttgtgggtcctttatatattcttacaaattattaaagactccaaagagcttttgtttatgtgaggttttgttattgatacttactgtcttagtaattaaaactaagaaaattgtaaaacaacacatcccattagctgtcagagcatcatcatgtcttgtaggctctggaaaactccactgtacactcatgaagaatgagtgtgaaagagccaaatagtagcttaatattattataataatagtttaactttgtgagctcaccaatataatacatattcatgacacagtccctaacatctaaaaacttacaatctaaggcccaacataaatactaatagatgatgctaaattctggcttcacagtgcttcctacaataatactaaaaatatatgaatttagacagaggccaaaatgtgtttattaaccacttggctttgcttagtattttgttacccaccttggagaattgcctctgctgatttacactttataagaagcagccctatgaaattttttatcataagtttaacaatgatgtagaacatactgtttcattttataatgatccttgggcaaaatgtataatatctgtgggagaaatgctcaatgctgcagtaaaaactatacttctcctcagaatcaggtatgttcttatatggtcagtataaatcttataactgtgctttctgatctcctttggccaccaggaagacaggagctgacaatccaacttactataaattcttcagggtctgatgtcattatttctataagattttccctggcattatcttatttctcaggtctcacttttcctttgttctgatttatttttcttaatatgttttattgtgtatttgttaatatgttttgttgtgtatttaattgccaatggggatgaatgaataagtgagaaagaaagatacttgatccatttgagtgggactgcttgagtacctggagtggtgcagaccaagcagggtaactgtatcaggtttcattaatgaaatgggtcttaagtggagattaggaaggaaaggaagtgggttgctggagaggcggggtgttttatgtgacagattggctgtaataaagatgcagctgtggagtgagtgagtgatgtcctgagcacagtaaggagatctggctgacgtggcactgcacctcattgccttaatatcttttcatttgattgaagaggcagctgagggataggtgctcttggaaagtggagtaaccatttccaattaaggaaggactctcacttcagtttctaaaataaattagaagggagaaaatatgaagtctgagagatcaattaggagaaagttctggtgctacatatagaaataggcttatccgcatatgcaggtgagagtacgaagaagaatctgtgaatggcagtcattttttgtagctggttccaattaaaattgattctctataatgactacttattggctgctgctcaccaggtctgcctttttcatcattgtctgcagaacatatcacagtatacagcatagagtaggtgcttcataatgtgttaaatggatgaaatgggttcctacctccaaaggagatggaaaaaaaaaaacaggcaagtaaataaagtaaaatatgtataaattgctttaagaatgttttataaaaaaggacagtagcccaacagcattcacagtaggctggctggagtagcagtcattgaagaaacccatgaaaacagcggcagaagcaaatgtgcagctgctctgccttttcacactgtagggcagcacacgaatagtcctggagcaccagggcccttagactgtgggatttttaagttacctagttggcacagcattgactcctcctctggtgtgattaggggccaggatacaataaacatatgttatgttggaactttgatgccagcctaaacttgccagttcagtgtttgtggttgcaggtagtatcagctcctctcctgatatgattgagagactgaggtccaaggcttcaggttgaacagaattgatggccctaaggattgggttagaactcttccaaagcacttagcaggaagccagtttacttttcttggatgccagcttccaagaaaagatcagtcttgagcaaaatagtccttcactctcagctcagaagcctaattgagagggtatcctataagtaacacagcccactctgctagtaacctgttctacttcaacctgtaaggcccatgaggctagccagtgacatcactacaggacacagtggaggatgtttaggaatggctgggtgatgaccagggtgcagattgtgtttactcaaggctgattgagaaatactgttttcagtggtgtgcttataaatgtttaacagtggtgggtggaaggggggctctggcttgtagcatttttctagtgcccatggtgtaaatactcccaacatgaccaactttaagttaccaatgtgattgaaagtagagtttggaagcgaggcacagtagcccactgttatgtagtatttttgccatacagatgcataagagacataagtaacctgaagaacatagataattattaaatgtagtaaaatgatcatgaagtgacagatcttgagtgttttatcacatttgtttttaatataatttaattttaagttgccataatttaatttgtaattaagactatgttaataattggcttatggaatttctgagaattcaaaaaccagtgcccataggtggatccagtacaccactaggtaagaacagcctagaagtacttctaggctcttgttctgaaaggtgccaagactggcatccatggttccagtgccagggtcgaggaaagacttactaggtcctgcagtattgctcccaaatctctttcagtggccagggaaattatcagcctgaaggcaggctgaatggcttgcttacattcaggtcccagtatctacgattgacaatcggcttcatttgtaagtaccagatagtgcaactccatgtatccaggaggctgggaggtactgagagcagactgatagtgtcaagagacactgaaatgactgccagctctctcctgccatatccactactaagtgagaaattcagtgacatagtcactgaggactccaccactgctgggtgttggggagggcacactgagtatttcaagacaatccgggtaagatttttcttggagggattcaagtacaaaatagttaatatgcagaaatgaagcagaaattattatacctcagaaatgagtcagataatactaaagaaaggaagaaaggaaagcatgacttgattcatgtctttaatgatgaccaaagaagttgggtctttaaagatgacaagagaagactgatcaggtagcagtgaggtggaaggggaaagatgagagaggggacattcctggtagaggaagcaaggtagacaaagtgtaggaatgtgaaagagcataatgtatgtaagtattgttcaggtgacttcttgggtacctagatagtagagagaaattagaggtaagaatggaggaaggggagactcagggccaggttgttgagggcattttatgccatgctaaggagtttccaatttttcctttcagtaatagcaagaaacttaaaatgagcaggggtttgtgtttttgaaagaactgggaaaacacctctgggcaatccattacctggggataatgggtgaaatttcccaagttagtgcacaggctgctgggtagggcttgaggctttcctcttgcctcctatttcaacactgtggtcttttaggacttgtcctcaacatgttcttaaaaggaatgtttgctaactgccaaaacagtagtcttcatatttattctgttcctttccaaaaggtaaattgaaaaagcaacataccctcagccaagagaattaatcttttatcacctaagttactgcccactgcctttcagttttaaagttaatttagtgtgcataaatggctatgagcccctggaactctctttatgtttgcatcttaaatttaccagaccctccttctgcctctagttccagaattttctttgtcttattttcttcaagaaatgtatttctttaaattggattgcaaatttggaatacacacagtcaaagccttttaaaaccattcttttaaaaaaggacaagtttcttgagaacatttttaaaggaaaaagttaaaatagatgtcaatggaagatgcaaatatgaatataaaatatgaaaagcatctataggctggagcttctcagtagagctctacttcatttaaagtcatattatctggcaccatttcaaagcttttggttacttgattttgtagttagaaaaaaagtataaagttgaaatattgggctctttacatgaccattttgctagtagcagtggatgaagcttttctctaagagatcaatagctttagtgtaaacttggtcaataccttattggaagaggtgactatgtcagattaggtagaaactttaaaagccagcaagtttccaaatgtccttctggaattggcctcctagggccatgtggaccagagagatcttatcacagaagtcataaactgatatccgtgagccaaatctagctcatgggcatgttgtttggcctacagcacattttttttttttttttttttttttgagacagagttcactctgtcacccaggccggagtgcagtggcacaatctcagctcactcaacctctgcctcccgggttcaagcaattccctggctcagcctcctgagtagctgggattacaggtgcccaccaccacacctggctaatttttgtatttttagtagagatggggtttcaccatcttggccaggctggtcttgaactcctgacctcgtgatccacccccccgcctcttggcctcccaaagtgctgggattacaggcgtgagccaccacgcctggcccacaccacatttgtaagcagatgaattggttatttttaaaaatttgaagaatttaacaacaaaaacaacaacaacaacaacaaacttttgtgtccagcttctttttttttattgtcccaatagttaaggacaatcctgggcctgcattctttgaacagttggctagacttaagtagctgctgccccttttagatggggcaaacattctctactttttcacagtccccttcaagggtgcttcagccatttttgctactcacttgtcttcaataaaccaaggtcatgtttaaaagattaaataacagttattgcatgctcaccaaaccgtcacaaggaaccagacttgtgtaccagaacagagtcctggagcatatctctgttaggctagacatcactcttttagttatgggatcatggaaaggtgcagaaagttccagggaaggggtcgggagggatttggtgagtgaggcacttggaggcatgggtcaatagcttttcaccagctagcatggaagtacttttagtgtttaaaaacctatggcacagtgggatcttctaggaaagtagaccctggagatggagattcacatgtagcacatttattaggggatgccactaggatcaatatctgtaaaagagagagaaaggatgtaagagtgggcagagggagaagttgagctgcaaagcaggcccagtgccagcctcaactggctccataaggagctctggctctggaatgcccttttatatttgtttcccatgggaccaggatggctaggccattctactctgacatgcatcactcactgaaagtgggaagagtcttgctcttgagtgaggaaatcccctgctactgaggcaatccctcaaaggagtaagaagtgaaagctcctggcctggagcacctgcaacatctgaaacaagaaatccttcattgaacaggatctgggcagcacaccagagtgatcacagtcagcagctataccagtgacaacagatgaatatcaactctgcctttagcccctagggtatgacacctggcctaccaaggctgtgcctaaactctttggactgattcagaatcaagcaagtcctagcctaaagagaggagtttaatgtcatgctacgctctagcccaatatttgctgacttgtaattcagtcattaaaaaaattctttttatcttcacatagttttagattgtcaaactgttaccgttctgtgtccagaaattaaaatctattctttctattctttttttttttttttttttttttttgtgacggagttttgctcttgatgcccaggctggagtgcgatggtgcaatcttgtctcactgcaacctccgcctcctgggttcaagcaattctcctgtctcagcctcctgagtagctgggattacaggcgcatgccaccatgctcagctaatttttgtgtttttagtagagatgaggtttcatcatattggtcaggcttgtcttgaattcccgacttgaggtgatccgccccgctcagcctcccaaagtgctgggattacaagtgaaatctattcttatattttattgtaacctcagaaaagaatgcttttttgaggactagagttctgtctcttttattgtcttctcctttctctttcccaaacctataactctattttgcttagcacacaatgaataatcagatgtcttaaattgtggcttacataattactagtataacttttttgcttttttttatttcattttaatctgttcatgaggactgttacccaggtatttaaaaaatctcactccattgttttaaggttagtggttccaaagggattttagagaccctgacccaataatagttatatttttctaagtggttctgaagcaatggtcacaagtaagaaactgcagttcaaaacacatcataggtttgttattttccaaattcttattaaagcattaatgcaaatggaattttcctactagtattctgctttctctaatccttgacaggactaattgctaaactataatatgatttattataattttatgtttatattaaaaatatagaatatgattgccctttgatgtcaaatactaaagatcctgctactattttagttgtgctggttcttttcttccttatctttcattcaccttttcaattcatctcataaacatttaatgaaaaacttattgtgtatcaagggttgtttattatatgatttgtaattcaaaaactttctttctctggtctgagaattttagaaacatgaaaagaaagagggagggagaccaactgagagtataaaaataaatctggcatttattaacagttaaccaatttcttttttctataataatttatctactaaactgtattttttaaattattgttttagtttttgttgcatatatttaaggtatacaacatgatgttttttataattactagagtgaaacaaattaacaaactcatctcctacatagttatcttttgcgtgtatgtgtgtggtaagagctccagaaatctactctattaacaaatttccaatatgcaatacaatattattaatgatagtctttctgctgtacgtcagattcctagacttattcatccttcataactgctactttgtaccatttgaactacgttttcacatcccctgtgaaaatgggaggggggccgtaccatttgcatggaatatctttttccatcacttaccttttactgtatgtatgtactcagatctaaactgagtttcttgtggaaaccatacagttggatcttcattctttacccattcagccattctgtatcttttttattgaggagtttagaccatttacaatttaagtaattattgatagggacagatttaagcttgccattttgtcaactgttttctatttgtttataattcttttttctcttgctctcttcttcagtgttttgttggatttttatgctgataggttttgatttcttcttttgtgtaacttctatatattttttctttgttgtcaccaaagggcttacataaaatattttagagttgtaactgtccaatttatgctgatagcaacttagcttcctttgcttataagaactctctgcttttacctcttctcccccattatatgctactaatatcccaatgtacatctgtttatattgtgtatgtagtaacataatttagttatagttgttttaatacttgtcttttagtttttatagtagaatgaacatatttacctaccactgttatagtaatacagtattctgtattattttttaccaatgtgttccctactctgctgctttctttttgtttcaattttaagagctatctttggcatttcttataaggcaaatctagataaactctctcaacttttgtttgtctgagaaattatttatcttgcctttatttttgaaggacaggattgctgggtatagccgtctttgttgttaggttttgtgttttttttttcttttttcagcacttggaatatatcattcaactcccttcaggcctgcaaggtttctgcagaaaaatcgtctgataatactacagagatttcattataagtagcaagtcacttctctcttgctgctttcaaaattctctttgtcttcaacttttaacaattataatgtgtcctggcgtgggtctctttggattcatcttacttggtgtcgtttgggcttcctggatctggatgtttattttcttcccgggactggaaaatattcaaccattatttctttgaatttttttctctctctcttctccttttgtatattccgtaatatgtatatgggttcacttgatgttattccaaaattcccttaagctatctttacttctcttcattcttttttctttttgcttctctgactggataatcatcaataatctgtttttgagttagctgatcttttcttctgtttgatttagtcttctcttgaataccttctgagtaaaaacaaacaaacaaactgtttttcctctgctttcacagttcaacagcaatcagtaaagaagccctttgtgacaaaatgtgtgtttagggaaggggtggtttccttcacacaacaagtaagcaatcagttctgcagtaaataccagtttggtgtcctctaattcaattccaacacttctactgagagatcctacagattgggggctcagtccccgagactgtcttcctcaaccaacttccaatgccaattgcaaaccccaggttattttgcctgtacttcttactgactggctataaactgaggttcccacaacccccttctgaggttcaattaatttgcaagagtggctcatggaacttggaaacacttgcttatgtttatgagtttattataaaggatattttaagggatacaaacaaacagccagaagaagagatgtctagggtaaggtcaggaagggtcatgagtacaggagcttctgtccttgtggagttggggtacacaacccttcggacatgtagatgagttcttgttcaccttcctgtaagccttcacatgtatagctgtctagaagctctctaaatcctgtactctttggccatttatggagacctcattggataggcatgattgacaatcatgtggaaatgtgattggacaaaaagagtattagctagtgctaacagactgaatggaaaacccagaaaggcctgtctgttcagattcttcctggtctctctctgcagcattctttcctccagggaatggggcaggaccttttttgaaatgaaaatcttatgacctacaatcagacaaagtaggtcagagaatttctttatggccagaggcaggggaagacttaagtgtatttttagtttctgttgcctgccttatggagaaaaaggaacaggtgaatagagggtaagagaaagtcatagagagatttctgttttttgaggcctgcttctaatgtctaaagcaccccagcattataataaaagactgtaataagagctaaggaagttatgagccaggaactgtggacaaagtaatatcacacccctctattttttttttttttttagtttacttactgtattatttatttccatgatttctgtttggtactttttaatattttctatctttttgttgaaatctcactttgttcatgcattgctcacataaactcagtgagcatctttatggctgttatttttaattctctgtgaaatcagttacctccatttcattagggtcagtttatagaggatttatctagttcttttgtttgaaatatattttcctatttctttattttccttgactacctagagctttctttaaattatatgaaatagccatctctcccagtcttgtcaaactggctttgtgtagcagaggtacctcaccaatcaacttgaccagagatttgtggtgcctcttttttttttttttttttttttttgagacagagtttcactcttgttgcctaggctggagtgcaatggtgccattcagctcaccccaacctccacgtcccgggttcaagtgattcccctgtcccctgtctcagcctcccgagtagctgggattacaggcatgcaccaacacgcccggctaattttgtattttttttagtagagatggggtttctccatgttggtcaggctggtgtcgagctcccgacctcaggtgatccgtctgcctcgacctcccaaagtgctgggattatagatgagagccaccgcgcccggcctggggtgcctcttaaacttttgtgcttattcaaaccaccagttttgttcttagtggccctcggtaggaatgtcccaagtcctaagttagtgaccaaggtagagaaacctgtccctcaagaagcagctagaaatattggggctctagatgagtggtccatcttcctctctcctcagggataagctgggagctggactttataccccactcactctgcagtccagatagaggatctgtgccaaatgcttgtgctctatttcagacaatgctctctttaaacatttactttgctctctcaaatggcaggtctcattagctgtcctggataagtgaattagctggaagcttggttatgtttctggagtgaggagctgcaggaagtgccctcatgcctgttcagactcccggagttctactaattgcctgctccatcagctccctgatgcaggctaattaatagcttaatccacggacagcagctaggaaagtcagaatattatgtatgcagtctaactccgtccagggagaaactgagagctgggtgtttttgcttgctcactcttcactgagcttggggaactagctgctggtagtgcacatgagctcatttaaaaccacttctttgttccttgtggtcttgggggacacataaatgccagtcccccatagctcccagagctaggtgatttcagagccagtctctcaggtgggagctgtaaaagttggggtgctcaatgtatggacaaactccttccaggagagattagatgcttgattttatcattggattgagctgggggagaaggcacaggaagtgcccacacactagtgcccacatacataccctttcaagctcccagaggtcttactaattacctgccccactggctcttagtccacttagtaatgctataaggaatacctgttgctgggtaatttatgaggaagagaggtttatttggttcatggttctgcaggctgtacaggaagcatgatgctagcatctgcttccagtgagggcttcaggctgtttccactcatggtagaaggttaaggggagttggcatgtagaaatcacatggcaagagatgaggcaagaaagaaagaggagaaggtgccaggctcttttcaacaatcggttctctcgtagaaactaagactgagaacttaaccactgccctgacaagggcaccaagccataaatgagagatcattcttatgacccagacacctcccacaaggtccacctcccacactggggatcaaatttcaacatgaagctttctggggccaaacaaactgcatcaaaatcgggctcccagttttagactatgtagaactttaatccttgggcagcagctgggaaagtgcaataaaacccctaccagagagaaactaggagttgggcaatatcgcctgttcactctgtactaagcctgagggaattggggtaggaagttcttgcacacctgtttaaaattgccaccttgttctctgtggtccagagataattgcaaatgctgagcctatctgcttccagagctaggtgaattggtgattatggtttggctctgtgtccccacccaaagattgatcatggggacggtttcttccaagcattctcatgatagtgagtgagctctcacaagagctgatgaagttttaaaggtgtttggcagttccccctttgctcactttccctctctcctgccaccatgtaagatttgccttgcttccccttcaccttccaccatgattataagtttcctgagccctccccagccatgtggaactgtgagtcaattaaacctctttcctttttaagttacccagtctcaggtagtttctttctagcagggtgaaaacagaataatataaggagcaagtccctcagggaggagctgtaaaagttgaggtgctatatgtgtggtcccaaccctttaacttctaagaaggtaaagctaggagttgggtttccttcctgattacaaagtgatgtgcctgggtggtgctattggtgtgaattaaccaatttcttaaacatcaactaggtgttccaaactgtgctaagggctagggaaaaggctttgttatccttattctgagagagcttatagtctgattaggaataagaaaactgacacaaaataacagcaaataacaaggcaacataatcagttgctacatgttatggtggtatataaatgatggtagaatttagaaaactgaaaggggacaggatagacaagagtggtcaggaaggctgcatggaagagaaggaacttgatttgggatagaagaaggggctgggatttgggaagacaaaacaaaagaagagggccattccagtatccaagtaatgacagatagaggcacagggcatgtattaacacgagaatagcagaagtttgatgttggttagaacttactaccaacttcttacagaactttcctctaagaattatgagtttgaaaacattcaacacctcaatctactttcaagatttcctggcaaagtgaaggaagcaaatacctttattattttacaactgaagttacctgttttgtcagttatgatctaggctgattctaactacctatgggcaacctagaacagtcaaaagagctaggaattcattcaaaagaccaaaatctgcattgtctggtagtgtgagcatgagcaaatcacttcatctccttgagccccagttttctcatctaggaatgaaaagtagagccttatctatctgaccaggttattatgctattaagttatataagtaaatgtgaaaattcttcttaaacaataaaacaatataaattttagttggtacttttgttaacatctacactagaccacgtttatataggtaatttaaaaataaaaaagaatggggaattcattcttatgtcatggatttatattttttttgtagtacaaagttaatcgctcagcagtgtttgttacatttcaagtagcaaccatcatattgccatgaaatttatttagtaacccctaactactttttttttaatgaaatagcatagaatgaaagtatagtgtatattgtactttttagggcagtagattatatcatttgtcataaagatgagtgtcgtttagtgacacacaaaggcataagtgacatacacactggtcaaaatgtaaaatatatttctttttgtggattgttgtcaaagaagattgaaagacactaattaataatatagtatttcaaatataaaatcctcagtcttcatattttgaaccctcaaattaaactaaccaaaaagataaatttcagagaaaagttattttatgtaaagaaagtgagattttgatgaaatgagacatgctaccacatattctttattttcttcttatgtctcttgctgaaacccaaattctgtcttcacttctgctgcccaagtatacaaagcaaagggattttttgtgtgtgtttccatcaaaagctacatgcctagaaactcattgtactctattttttctggtagctcttgagttgtttattttaactatcaatcaatattatataatttaaaaataaaaacttaatttgtgacaaagtaagttttcagtctgggttcaggaaagaaagggatggcatatgcaaaaatgatgtaaccaggaagaatgcaataatatgtctatgtacaagaggggtgatagaattaaggaaaccaaccaaagatggtgaagaacccagagctaagaaaagggtactagctcccaggcctgaaaggtcacagtgttctaggttccagaagtgacactgagcagtgggagaggagcaatattactagtgccatcatgggaaaccagtcttttcaggaaagagagaggcatggaggggacaggtgccaatggctgaacccaatgaagaccaagggttctgggcaatgtcatctgtaatggccaacttcctggggcacagagcagggaagacgagagtggaaaatgagtgtggagcaacaaatggggagtaaccagcaacctattatatgaatgatcatttttcatgtcagatggtggcatatagcttttctactcaaattcagtttccttcctctgtttgctaactggcctagaccaatcctgatctagcccatggtagtttactttggttcctagctgttgggtagccaaccagtggtgtcttcctgcaggaacttcttagaagggccaaagataaaggatgaagtgtcctcattgatttcatagacacaaccagttctagatcactggttcaaagagggtaataaattagtaaagtgggagaacacgaaattaggaagattcatttctgctttattgtgaactgggtcaatttttgctttcttaatattaatcttgaaaaagatatcctttgaaatctcaaaatccttttctgtaatttaaaaacaaccttaccatctgtgtcctctgtcatatggtacaatattcaagagggtgaaataatggtccagtgactaagaaaaaccttaaaggataaattggccttagtgactgtcactaaaatgtaaacatggctttaaaaagtaaatcaggaggcatgaaagggccttgacagctaaggctctcaggaagggtctagaaagacatgaagcacaattttataagtgtgatataggagttactcttctttttttattcatgtgtcatagaagggaaaggaaatttctaaaggagtaagaccagccagatatcacaagaatatacaggaatgtaaggatagcatgttcaagggcaacatgaggagtcaaagaaaatgtcctggatgccaagactagctgtgttcttgcagctgctggctcctccttggcaaacacaccattggcaatgaactgatctgatgtgaacccctctaagtccttgagactctctttttattgcaaagcttgccagcctctttacccagtacatgtactccactctaagaagaaaaaacaaaactaagtgactgctaagctcatggacaatgtttttgggtctctccagcagccagctagtggctgactaggtaaaatcatttatttttctcaagatgttgtgattctgggaatgcagggtttggctgccatgttagcctggattttctgagatgcatccctgcaagagattcactgggaaattagatgtgcaagagatttatctggggaaatgcctatgagggaaaatggagaaggagctgcagaaggctggaagagatgaccactgcagtacaggtctaatcccagtggaaaaaaaaaaaggagagaaggaatgagaaaagggaaagagagaaggagggaagaaaggaaagaggtagggagggagggaaagtcttagacatcagtgcagtgccaagaaagttttggcaaggctgatggggagtcttcaaaccaaagtcacttgaaagaggaatcccctcatcatccctctaggaatgggcctgccttggtgtccttgtcatgcaaagtcactggctgggtggatttcagagcatagcagctgagggcataggccagttacactctgccataggaggcttgagagatgcattttcatagctgccacatttgccactgaaaccttctgggagtgatgggttgtgctggaagaatttgaagatactatcttatgctccagataaagaaatgcattgatgaaggcccttcactattagatttatttttgtgtgtcccaactattatataaattcccctatcaaggaattttcagtgttttctccttgcccttagatatgtgatcttatatcccaggtttgctgagacattcctcttacagatagttctactggctcatgagtgtaatgtgtctaaatgtatggttggaaaaatgtggttattagatctaaattttaagtccaaatttccttagcctgaagtttagagtcttccacagtctagtcccaaccactttttccaaccttaattaccattgcactttatcctgtatttcaattcatttgaaatatttgctcctttctaaattactcttgcttacccaccactatctctttgttcatactgttctcttcaactaaggttaattaatcaacatgtatttattgcccccttcccatgggccaagccctgtgcttagaactgtatgttaggggacaaaacgcacatggtttctgtcttcttagagtttgaatttagtagaagaggaacagacaaatacacaggtcaatggacagtgcatgcttacaaatcatgtgacagtgtcaaaagtaaacaaagagggttccctgacagagaattagaggaaggttttattttagatagagctatcaggaaagaaatggcatttcagctggaacttgaatgataaagggaatgtagttactaaggacttaagtcctgcaggtaccagttccatcatcttcaagatattgccatgatcttcacaaaatctttactgactcatcattggactctcaaccaattttagccctgtgctatctgcatcttttatatcacagaaagtgttgaagttcatactatatactaaatgtgtttgtctccaatcagactataagattgtggaatgttagacccatgtgtgatgtatgcctttgtatcctatcagattatatgattttggaaggttagagctatgtctgtatccagcataatatttatctctgtatctgcatgatacttaggataatagtatgtggccacatccaacaaatacttgttgaatgaataaacagtattccactctctgcaaatttggtctttctgacatttgtctgaattatagaaggagaaggaggctttacataatagttgaaaattactgttcatgtaatacagagttctgaacttcaaccagaagcaagtctacagcagatgaaaacatttgtaatgagggaattagctgtggataactttcggataggatgttataagtttagcatttgtattaaaatccattattatatgcataattaagttttaggaagaaaatctggctgaatagtaaacaattactattttcaaacagttcttcagcagttagttaccactggcttctagaatttaactgttgttttttttaatatatcaaactagcatgtgggttgagacacaacatcacattacaaatgggtagtcccttcacttgtagatcaatcagtaataatatagatactgatttttacagtttgtaaaattattgtcatttctttctcttattatctgtattctcagaaacaaagagtataaacaaagagaaagggcatgatgtatttttgataggctaccatctcaaattttcatttcaatgtttatttggagaaacacttttatctaaaatggaccttttccattttacaattgcacttgctctcagaatgagaactgcaccttccaggagagatttcaatctgactccaaagccttgaccctcacaaacagtgttgtttgtaatggcccctggttagaaactctcagcctaacaagcatgcagcatagcccctgaagtctctcctcctatctgcataaattggggatgtagaactcctgcatatccagcctcacttactcataaaatgctgggaatcattccaaattgctcttccagaggagggtttgtttttaaaattatttcagatagagatgtttcaaattctacataaatgcataatattatttctgattgtgctttcttggtatttctcttcctgtaacacctacttagccattctccagggaccacttcaaggacttttgtaatccatatagctttcctaagctgttctaactttcagcaatcccaaccacatcactgaccgagtttgtaatgactcaccagacaatgtgttgggtcctctagtaatactttgttaattccaagttatccttgctgctgttgtttctccgtgtgtgtttctatctgcgctctccagttaagctgtaatcaacttaaccactgggctttgtcttatactctacttctcacaacccttgcctcttaaattggttaatgtatgtttgatgactaattgtacacataatagctacttgataaatgttcttaagaaagggacaaattaagtattttccctgataatcctctataccaggcatcgctgtggaaagctgcacagttgggaaagcgtcatttcaaaaacaggaaaaatcacctgtaaattatttcagggatttgactttgacattatgttgacataaaagaggcttaagaacagctattagaaaatagaaacagataaatgaatgagtgaatggcatacctaaatggcatgaaatgtgaaaatgatacaaaatgttaaggtaatccttttttcttctctaattaatctccactgggtatggggaatagggaacaactggggtattcgtaacaggcaaacattcctgattcttgccctactaaaggtagggacattaggagaaaggatcatctacttggaaaataaactggcattgctaagtctaaatgattgagtcaagtgcaaattttataggccaaatagaattttcacaagtccattgactgttgaaaactacttgtaccctggctcaaaggacattttcttgctgtctgtagtaagcggtctgtaaactgtgtttaggacctgaaccgaatgctggcctttcacttctcaaactatagcttagtaatcccagctcagaagtccctccatacacaatttagtaaaattaacatcagagcataaccatgctttgttccctccagaagtaaaatgtgaagtttcttcccattggaagtctatttattattagtttcagatgttgtgacaccgttttcatccaaatgttagagaacagaaagaagccttttttaaaagcgtaactttcattattcatctaggtttttttcagggtccttgagaaatgctaagattatgccttgtgtttgagaagtagaaaaggaaaaagggaggaaaaccacctagagaagtgcttctcaaactttaaggcacacatgaatcacctggggaccttgcagattctgattctgaaggtcagaggtggggcctgacatcctgcatttctaacgagcttccaggggatgctgatgctgctggcccacagaccatactacctagagcagcaagctttataggccatagaggacattttttttttttttttttttttttttttttttgcatggagcacagattactgctctactctaggttacaattccaaggaaataatgactaaagaaaaatactgctgtttcaacatttctgagtcatttagtaagaatggaaggttaacattagcaatttaacatttcaaatgtggtgggagtatttattgatgtactaatttgcattttgttcctgccaaatctttttactctgttggctccagggagtttgaaagtctaggacagaatttttcttcctaggtttgtttacatattgtggaaaagaagtgagcatctttggagttaaggagagttaagacccaaggagaagaaagaaaaagactatgaaagatttttaaaatgtttatccctgtgtaagatctccaaagcccctcccttgacccagtagtagcaaatggagccacagtgatggctgaaattgaatatcccactaacttggtaaaagttgggcaggctcccagtcagacttaaatcattttagagaagtacaataatgtggcattccttgcaccctggtgatatgcagaaaatacatacctgcttccgacgaaatttaaacatggactgttaacaagaatgtacccttaaagttttgtaaactctacagcaaagaaaaaaaaaactgctacagaaaaaataaggattttttttctagctttaccagcgacctatactttcatttcttcatgttactaattacagaaactttcagcagaaatgtatcactcttgggcatcagttagttctaaacattttagctcttaggagcctctgatgacatctgttctgttgttagttttgctccctgactagattgtaacttctaagctcaggaatcatgtctgcaactacttttctttagtcctaacctaaccaagagctaggcatttaggaaatgctcactataaatgtattgacaaatgattatgtataattagctcttcatcacaatatttttcatcatcaagaaatagatttaaaggagatattttcaaacagtatggatgtatcatccccttacctttatgtatgtgtctggttgtgaatagtcagcacatattatggttaaactcaagaaacaagggaggttattttctaagcctgcatcatagcagtagaaatttggaaaaaaacaaaaaacaaaaaaaaaaaaacatagaattaattgagttgtaatcaaagaaaattatgtgactataaattgtaatatttctaaaatatacccacatatgccaatctattgtaagaaaatgttcgcagagggaaaacaatggaaattcctagaagctttagatagattctaatgattggaaataagtattacaaatggtccacattttaatgtgacttctagaattttttagaagtcatagtatcctttcacgctcttatgctgcttgcttacaacatacacttgggtcacgtttttctgttaggaaatatcatactaatgatttgtgatcatatttaccacttggggatcttggtggccatgataaggaatttggactttattctgattacatgggaagccactagagaattttagccagtgaggtagcatgatcttacttatgccttaaaaaggttaattgttttggtagttaattgaaggaaggcaaaagtggaagtaggaagtctagttaggaaactatttgattgttcgggaaaaaggtgctggatgcatgggctataataatagcaaaggagatggagagaagtgaatggattgagatggaactgaaagaacttgttgatggttaaatgagttggaaggagttagagaaagcaaagtgacaaagatgactcagaagtgtttggcttaagtacctgagtggatggtgaaacaattttcagacatagagaagaatttaggaagaacagtttttttcagacattgctcgagagttctgtgttaggattgagatacctattagataccaactgaagatactgaagaggctgagtagagtctgaagttcaatggagaggctcagactaagatagaaatttggaaccatcaatgtgtagatgatatttaaagccatgagactcgatgagattccctttgcaggggaaaaaaaaaaaaaagctagaatattggagggaagagttttgtaacaggacaatatttatgggtcgggcagaggaaaagaagccagtaaaggagaccaagaaagaacagtcggtgagctagaagggacaccaagtggctcaggcatcctcaaagctaagcaaagagcatatttttaaaagacagtaatgtactgggtcaaatgcctctgagaagttaagtaatataagaaataagaagggactattgaatttgatatgaacaggtttagtggaatggaaggattagaagtaaaaccaaagtagattcagaagaggagaaattaggaagtagagacagccattcagacaaggacttaaaagatccaggaatggaaaggaaattcctgggagcgcaacccctaagaagccaaaaatagagtatgctttccatgtaggtttttaattcttttttggtggtgttctttagaaagagaaatgtctgttgggattattgtttgaaatggtgttgggggcccaaccatttctggcttctatagatcccctttttgtacatgctcattcccttaaaaaaaaaaaagaagaagaagactagattttctaatttagggcaaggggctaatagcaaaccaaactcatttgtaatctaaatggtcacatattattttggttgctcttcagtggcactagctgctgctaggaagttcattttacacacacacacacacacacacacacacacacacacacacagcatttgctgcagatcctaaacttgaagccctggatcttccttacatcatttacccagaagtatctttgtcaaccttcttaacttacatccaccagaaagtagaacaaggcagaagttgtgtgggagttctgttcctccccatttcccccctcacctgctggcgtcagcacaataaatactgtgttcagaacttggctaactgcttcttttcccacattcgatcagggaatacttaaagccatacagtgtccttgttctgccaaaaagcatatggggcaggttgccccttcaggctgacacaaagacacactgtgcaagacatctatggccagtggagtggccgtgtatgggttatcaatgagacttttgacttttttctttatgtcatattgtcatcacattaaatagaattcaaacaaggaaacaaaatttatattctagacttttaaggcattgcctgccctatagctatgaaacttttctttttcatacctggtataattttccactttaaacaatgttgtgtgatttgattaccgttttgactctcatttaattgtccattttaaaaattttaactgaagttagatttagatttaaagttcaatacccataaaggatacttctcaatagagccgagaacttcagaaggcacaacaaaaaaagggcaaagttcaaaaaactaagcatcaggtagctactttttactgcccagggacatgtctaggtaaactgtcaccatatccatctacatttgcttgctagtagagcttccattttctactgcaaaatagtttctggaaccacttccatgttggccaaaagagagtgtcaacaattcctttccaaaattgacctttagaaagtgaatctaaaatgtttgattcaagtatgtgaggggagctgcatcaaagttttcatttttactacatacaaaagtgacagataaatccgtaaaatgtatgcatttttctgctaagactgctaattaatttaaaaagagattgttagaataaaaggtcagagagtaaacatattacagatatttattgagagcctgctgtgtgcagagttggaaaaaataaaatgaggttgctcctttcaacagacttacaatctaattgagggagcgacagcataaatgtatgcaaagcaaataatgcaagatacagcataagacataattaactatcagatgagtgacatatataataaataccattaattcacaggcaatcgtaatcagaagcacttaacttactatgtgccaggcattctgctcagtacttcacatacattatttcatttttttgaaatattatttctactttatagatgggaattggctctgatcttccccctattctggagaaagcaaggataatggtgtaaggtagacaaagacccaagcagacatgttggtctggggcaaaggtccatttaagggaatggagagaaatgaaccctggggccagcattagtctgtttacaaccatatcccagtgcctagtatagtgccttgcacataataagtgctcaataatatgtcttgaaaaaacaaatggccctctggtctgtgcctgtaatccagatcaagtaccatggaataaagttaattagtgaattaaagccacataccacatagcttaaggacccatccccaagacctcccaattcccaactatgacaataaaggattgcagtggaaaagatacatcataaggggaatagcaatagcaattccagctcactggggtctatttcatggaatctgacatggtgaacagttcataagtttatttccaggctgcaagaccctgcaacatctggcctcttgcacctccacaacctcaaatccttctattcttctctcactctctctactcctgccacacatacctcccttctactcctcaaacccatttcagggcctatattcttgcttcatattgcctggaatgttcttccacaaaacatctgtgtggctcattaccataccttcagatctataacagccactctccccacatcttcccagctgcctgacattataatacacatctatttccttatgtgttcatccccgtacacactagaacatgggcccaggaaggcagaattccatctgctgtttttgccattgaatgcccagcaactaggacagtgcctggcacattgtaagtactcacacacagcaactctaactcaggattactttttctagctctgaaatacctacttccaagagaacgaaatttattcaagaaatgttggatggaaattgaagagtgagcttggaaacgagacacagagtggcaggagcccagaccaacctgtttatgaaagatgcctttgcccatagagggaaaaatacaccttaaaacctctgccaaagtatatgctttcttaggacacctctgacatgctgaattgcacctggtctgaacaagatctatgaatttgccaaaacaactaattcctgtgatttaagagtcactactaccagtatcagcctagtaaacaagtaccaagcaacgagcaccacatatgtcagtatccaaagacaaacatgctgctgcatgcaaaaccagacaaatgcattcacgcgggtgacagtgagtggaagaaattaatcttatttttattattttttcccttatcaaacactagcaagggactagatgtcataaatctagttaaaatatgttgactttgcctcaaatttgagcattcatggttccaaaaggacacttgttataggatctgatgatgtactttagaatcttcttttgtgcaaattgagacttcagagaactcaaaatatatggtaaattcaaagtaatattataagtaaaatcataatgcctcacaacattttttgaaagttaaatatttagtaattttacaaatatgtattgagcactccctatatttaaggaactatgctaatgctgtgatggatcaaaaggagaataagccatgatccttaccttcagacttcaagcttattattcattgggcagttagataactaacatatcagacatggaataataagtgccattgtccagatattaaaaacaaaattggtgttgtggaagcaaaaagaatgtagagatggatcccaactaggagaaagaaaaattgcttcctaaagaagacacagattgaccatgaaaggtggatggttctacacaggactagaaggtaggaattcttcatttgttggacttgctaattttttttggtgtaaatatacccactgttgttgatttaaagttgataacgtgatgcaactgaacacagaactgggaagagaaggtggctccagcacgctacctatgagtcaccagctgagctccagacttaattaaatcaacctcctcactactattttgaatgagtgaattcacaagtcttaaaaagatctatgataacattataagggaagagatagtcacttctgtcattctcccttacatctccatctcaccttccaatattctgtttgaatatccttccaatttcagtcatatgttcctggctggcctacctaggattaatattggcccagtgccaaaatgtgattctatttattccttttagcattgctgtgattaatctgcgctcctgttatcccatggcatagcaaactctcttactgattatggcctggtattgacacctctgctgttctccataacgaaaagcagcttttggggtggctagctgggcaggatgttttgctgctcttgtaacagtaggaaggaaaagctggaggaattactgggaagctttgcagaaggaagatacaggccagctgagagccagcattcatattgcctgttcctttcagtattctttgtgaaaacaccaccaccaatgtgttccctggacgtcactactgcacctttaactggccttattatgctagggactgcatttgaaaagccaaactctagtatctgtctgtaattgcaagcggatatctcagcacatgcacaagcttatgtcaggaggatgtttatgaaaaactcaccaagcagaacactgctagacaggaaataaatatgtgaagcttgaagttgttaggaaacttccacatttgtccctctaagccagagataggacctgtgagaaaagaaggtctttatcattgcgcattgattcttgctgaacccctgctattctcaaaatacatttacagcaaaatgtggctactgcagatgtatttaaacatgtgcttttttaaatgacactggtttatcttccaagtttgttatctactattttactgtaaagcattaaaaagtgtttgaaaccaccagcaccatttcacagttcctgttttatttgtttaaattctctagctcatgtaatatgctgtatgatttactgttcaagtagagaagaaatacactccctcatggagatgtggggaggtaatactgtctcttggaagggctcagagatttcctgtttagattacacaggcttctttagagctgccaagagtcataacatgtacgagataatacactttggttcaggaaaaactatggataggaatgtaattaattcactgagccacaaaagatattccagcttagaaatgtcactgcactcaggcctggtggactcagtatgccaaggggtagccatgaccaaaaagaggattgctgcctgaggacccactgagtagtatccaaccacagagcaaaaggagggggcctggctgctaaggacatcacacgtctcacctgcttctttgagaattgatccctgaagggtatttctgcccaaagcctcagcaacctggcttcatcaatataactttgtgatgcttgtgacattgagatcaatcaatcagcatgtactttatcaagtgcctcctcatgagtaccaattgtggcacatagtggggaaaccctagaggcagagccctgcagaggatatggtgattctgaccagagcaagaaggtatagtgaaaagtttcctaaatatattttgtgtcttgtcataagaatcacctggcagggaggggtatggaagggcaaggtaagcatacacattcccaggacctttccaaaatgtagagtgaccagggacttagagattcagactctatcaatctggggcagggccctagacttggtatatttaataactgctgtgtgaggccctttacatgcatgacctcctgtaattgtatagcttggttgctgtatatggtactatgtttacttgtgtttgcactgtctattcaggggtgtttctaaatgccattgctacacaactggtgaattatgattcttgccagaacattgattctcctactcttgcttccttaatgacacactagagaactgggattggctgcatttagtctcaggatgaatcattgccataagtagatttccatcccctactccaccaactcatttgccaaacacccttaaagaacagaacccactgcctacatgcagcctgcaccaggagggcctaaatggtctagctgggtttatgacaacatcccgtcttcacatcagcaaaaccctaagtgcacaaagtctaatgtaaacacaatgtcaagttctccataggaaaagacatgtccctgctgtcaaggtagtgactagcaataataataatgacaaaaacaataacaatgataagcatatataacacttacttatcactaattatattgtaaatgaaatgatttgcatgtactaactgatttaaatcttatatatatatagatacttttactctctcaattttaaacacagagaaaccaagacctagatacgtgtttctgttgagaagttgagtacaaggttgagtgtaagtagggaaagttcaactgcagtcagttctagtcttggtaagtacactgtgaggcgctccaccccaagcatagcaaattaatggttccccagtgtttgcagaatcaaaattaagttctttggctaggttctccctgatgtgcccctgcttcttccctaattcaacacatccccagctccatccatgcattcccaacacatcacagctctttacatgcccaggctgtgtcttctgcacctttgtaccttctgcacctttgtttccttggccccaactgccctttcttttcctccacattaccctttatcccaaatttagcacctgtctcaaggagtcaccttcccaaggaagtttctccaaatttgttaacagatattccattgttcctccaatgcttgaccactcttcctttatagatccctgcctagaaaaatgtgggctcactgaggccaggggctgcagctagtttattttataacccagcatttaaaagtgcctatttattgatttgttgggaatagttaataaatggagtccttgcagatcataaccaagaccacagttcgtaatggtttcattaactttgttactattggatgtgattctctgcttatggtcttcctttacttgtttttcccttactgctcagcacctctagacattaggtacatggctctgatgctaattaaaattgatgactgagaatgacacttccatttgctaagccagcgcagttttgttcattgtgctttactttttaaccagcacccttagcataaatctgtagtctttccatgagggtaccatttgttccttttatgtctcgattcattacatattttcaggactgttagctgactaagactttttgctttgtgaaaatgtcaccaaatgcacgataaaggcaaagtcacaagatgtctgtttgcaaaaagaattaaatgctggtttgtgaagattcaaggctggccagggctccccaagcatttccaggccagagctttggctctgcactctccttaggatctcataactgacccccacattccatttctgccatcgtggaaaaatttgtcaactttactgctgatgttaggcctggaaattgtcatccattagttttctcagattcaagctgaaaattgagacaaacttcctacgtaattttgaccaaaataacacatatgtttatgtgctatcccatgattaacatatttttaaaaccactttattgaggtatggttggcatacaaaaatctgtgcatatttaatgtatacagcttcatgaatttggagataagtatacatccatgaaattattactgcatgtatgccataaacctatcacctacaaaaatttcctttcactttgttattattttgattaacttaatttttttcttcctttgaactatcaaaactttctcaagtaatacatagttgtcagttatacaaacttactgaaccttgaccaaaggtcctcttttagtgctcatcttagagaaagaattaatgaaacaaagtgttctctgatttgtagcaaagatctgtgatggtggtgggaatggttctagaaaataatggtaataataaaaacttagagtatcaaagcagcaagtagatttgaaggaattgttacaatgcaattttgctttcccgccactttaaaatcaaggtgtagtactttatttactttaggaaaatgtttgctttttgtcataattccttattgcatatgagagtaaatgatctatagatgaagataataataaaatttagagagagaataaaaaagaaacactttcacagctgaaaggctgcttcccagttagctaactgggaggagttactgaaaaagtacattgaaaagcggctcaggggcaggtgaattggactcaccaggctctgacattcagagagatgggaatgagtcagctcactgtccagcacatctttattttatttctctttcttgttttatatcagaaatagatttcttggcattgttactgtgggtttctattaaggactgaaacaaaagtattaataatctgagagtatgtaaaaaaaaaattcattttctcctactatactctcataacacagaatattttggtgaccagagatcaccaaaatgtgtgtggtgtcaacgaaaagagtcaaactctctaaaatatttgaagagattttttctgagccaaatgtgagtgaacatggcctgtgacatagccctcaggaggtcctgagaacatgtgcccaaggtggtcagggtacagcttggttttatatattttagggaggcataagacatcaatcaaatacatttaagaaatacgttgatttggttcagaaaggcaggacaactcaaatggggggcttccaggctataggtaaatttaaacattttctggttgacaattagttgagtttgtctgaagacctgggattaatggaaaggactattcaggttaagatatgtttcttattggacctaaaactgtgcctggctcttagttgattactgcctggatctgggaaggaaggaaggaaaacaaagggggaaggggattctctatagaatgtggatttttcccataagagactttgtagggcaatttcaaggcatggcaaggaaatatactttggggctaatattttttccttgtctcataatgttatgccagagtcatattgaaaagcaagtcacaatatacaaggtcaaataaaacccatcctgatgagaacccatggtttgtagggcatgactccccagaacccttaggtaggaatttgggcaagataaaaaatcggaacttagtcctcggtgggaatctctccccacacaaattctccaacagattcttcagtgggacaccaactgggtgttctcaaattcaattcaattctgacaatctacctatctacctggaaatagcatcagataaccacaggtttacggctcattccaacaatactgtcccccacttcagatgccaactgcaagtaataggttgttacctatacttctagccagtcagctgtaaattggtgttcccacaacctccccctccggtttgataatttgagacagcttgcttacatgtaccagcttattagaaaggatattacaaaggacacagatgaagagatggatagggtaaggtatgtgggttggagttgcagagtttccatgacctctctgagtgcagcatcttcatgtgttcagctatccagaatctctcggattaagacattggccactggtgatcaaattaaccttgagtccctctccccttcctgaggttggagagtggggctgaagtgtctcaacctctaatcaactcttggtctttcctgtgaccatgccccatcctgaggctctccaggagcccccaggcatcagtcaactcattagcatacgaaagacacttatcactacagagattcgaaggattttaggaactgtgtcaagaaacggagacaaggtcaaatatgtatttcacaatatcaccagtagtttcactgggaggtaaaactcagtgtttactgtgggcctgagccatgctgaccctctaagaataacttagaggtaacgtgatcagatgtggggaattctggagaaacacctttcaccaccaagcccagacaagagatgcatacttttctagctgggatgcttacaaagcaacccactctaatacttcaaggtagagtgacactacattcatcatttttcattttttcctgttttttatgccatctactactaatgtcaatcaaattacgactgtgtttatagtggatgaattatggaccatctcacaccataaagttctgtttctctcatgttgagcttttcacctcccttcattccctccctacttccaggatcattcacatgtttatttctaaaaataaactttttttactgaactttttttcatactgtttaaaaagaatttatatttctcttcattcttacagataagattcaagtttaaactcaaataatgtaggaaatctttttttaaaaaattgttccctactgtgtctaggcgtgagaccaaaagtaattaagaccaggttttcatttgctgtgatttgtgtgagttctttttagaggttaggtgcaattttaatttttaaaagggggattattatgagaggagaaatcatactttatcatttgaaaatgatgccataacaggtgttagcagaaaaatcaaactgtaaaatattttaaagagatttattctgagccaatataagtgactgtggccccattgaaatgagcgagttccctgatccctctcacagagcttgcgacagggatgtggctcacctgttcagttgccccactgctcaaacccctagggggagaatacagacggtcaggtgcaaaggctggggcaagtgccttggccccttggccccttagccccgaggtagtgtctaggggtggggtgcctgcaaccccagtgttacaaagttctttcagctttgcagtccacggacagcttgagtgttaatcagctcaatggaccctctgccttatagcaaaggcagagggccagtgtgacagctttctgtatcccaagctcttgcccagtgtcctagaaaaaacagatcatacaggggctcgaaggatgagtgcaaggttttattgagtagtggaggtggctctcagcaagatggatggggagtgggaagtggggatggagtgggaaggtgaacttcctctgaagtcgggcagcccagtggctggactcttctccaacctcccccaggcaagctcctctcagcgtccagatgttcctcttccctctctctctctgccgcatcatttcaccatctgtctgctggtcagctggcttgctggtgtgctggtctgttggtctgctggtctgcttctggaacctcaggttcagagtttatatgagtgcacgatagggggtgttttgggccaaaaggtagctttttggacatgaaaacggaaatgcctgttcccatttagggctgcaggtcttcaggcttgagggtggggcctttgcccaggaactaccctcttctacccagtgtttccctgtctcctgtccatatcaccagtattcacagtctcaaggagtcttgagaaagtgtgcccaaggccgtcagattcagtttggttctgtatgtttcagggaggcaggaattacaggcaaagacataaatcagtacatggaaggtatacattggttcactctgaaaaggcaggatgtcttgaagtggggacttgcaggtcatagtttggttcagagattctttaatctgcagttggttaaaggaacaaaactgtacagaagcttcgagttagcaaaaagaaatatttaaattaagataaggatgctatgtcagagtcagccacaaaatgacctgtttagcaagattaatggcctataggtgtgacttaacccttgccttgcatggcctaaggtcttgtttataatttagtatcttattgcccaaagagtctatttagtcagtcttatgatctctactttaacattaatgctggtcacttgtgcctaaactccaaaggggaggtatatccaacctgccttcccattgtggccaggaacctttctctggagtccccttggccaagaaggggtccattcggttggtttgggaagctgaggattttgtttttagtttacacagggtcatatcagattgttttgatggggatgactaatggttttcttctctttctgtttcagccacagcagctatccttagcagagcaccctggagtctgcaaagtgttaatccaggcctaaagacaagtaagaatttcagtcctttttcttccttcaatgatattttccatgttttagtgtaattaagctactatcctttctctattttatttgggatggtagtaactggaatagtgactgagttgaaattttataggcaagcaaaacattttttaaggatttattttttaacttctgatatagtttggatgtttgtcccttccaaatctcatgtaatccccaatgttggaagtggagactgggaggagatgtttgggtcatgtgggcagattcctcatgaatggtttagcaccctcctctttgtgctgtcctcaccatgagtgagttctcatgagatctggttgtttaaaagtgtgtggcacctcccccttcaatctcttgctcccactctcgccctgtgagacacctgctccgcttcaccatgattataggcttcctgaggctttcaccagaagcagatgctaatacagcctgcagaactgtgagccatttaaatcatttttctttataaattacccagcctcaggtacttttttatagcaatgaaaacaaactaatacaacttctgtgcaaggctgcttttttttctattttttgcttgtgcttggaggttaagtaaggccaaattaatgaaggaggaaaaaagaggaaatgatacatcatggatcaacaattatttattgaatttaggaaactgcctctttttataaattctttttaaaattattttcattattatcttgaagtatttatctaaggtttacactggtagaaagttaaacttgtctctccaaccaaattgccttaagcttcaaaattatgccttattgtaagctctttcttaaccttaaaatgactttacacattccccgctggtcctttgacaatctcctcttcaaccacaagacagaaccccaccatcaactctgtggggaagcgtctccaaattctctagtcctgaacaacattctgccttctctgcttccatggaactttgtcctttacaacatgatagcgtttgcctcctgacattttagtgtgtgtgttagccctgcatatagaactcaccagattgtgtggactgcatgaatgaattaattctattgaactttaaggcaaagcctaaactttatgcttcttctaaatcccttacatctcctaaaaaaattctgatccatagtagtaggtacttgtttaattaaattttagggatggatatttttcatcagtggaagtatatgctagagtccatattatgcaataagggaagggaagacagtgtacctaaatcagttaagatattgctattcttgttgttattctagagtcacgaaatcataatttgaattttatgactaaattgcagaattaatttccaatgtgagattttaacattatttccttggaggtgaccaaaaaggagagctggtactgtttttaacaactgtcattcaattgtcagttgtgccagaccacaaatcctttatagccctcctgtttaagaagcatctgacatgttaagctgctccctaattaacacagaggttgtaaaagaagtggctgtttggttctgtttgggtttcccagccagtatattccaaagccttttttcactcaacagatgagttatgtgctttatattctgtaaggaaatgagaagtaatcagttgaaaatgtgttactaatggtacatgcttcacattgaaaccatcctcctgacacaaacataatactttgccctccactgtcccccaaagtggcagtaggatttctctaagtaattttctttacttatatgagtgcaggatagggggtgttttgggccaaaaggtagctttttggacatgaaaacggaaatgcctgttcccatttagggctgcaggtcttcaggcttgagggtggggcctttgcccaggaactaccctcttctacccagtgtttccctgtctcctgtccatatcaccagtattcacagtctcaaggagtcttgagaaagtgtgcccaaggccgtcagattcagtttggttctgtatgtcacagggtctaagaagcgtaaacattgtgtcttgttgaaatacagcctctaggtatggaggatgtgttgaacaacttcctaccagtcatttggcatatgttgatttcctgtcttcatgatacgtaagacgactagctaattatcattcatatgtggtaagtcacatagatactgacttcccctatctttccagctttttcttatcaaaagtcacctgctctctgtcccaggaacgactggctaaagtaacctatatcagtgtctgtaacagtgggcacctatcatagtgcacatgcttgaacatatcattgccttttatcatcacgagcctcacatccagatgtgacagactcaagtgctcacatcacctcactctgtcactgtatacattgttaccgtgtcacaaatatttaacagtctgctgtgtactcagtctttagctgtgtgccctgagggagacagagtaagatactgccttgacatcaaggagctcacattctccctaaagagataatttcacatgaaaagttagtgtttaatatgaaaagttagtgtttaacatgaaatgtcctgagaatatacaattataatttacacgtttcctgtgtgtacttttctaagttctcagactcaaaacaaagccccatggaagaaaaaatgaaataaaaaccctgtcaggacaaatcctagccagaactgaccaaacataaaaaataaatgccactgccctctccaagctacctttactttatacttgggtccaagaagcccaaacattgtgcctcattgaaatataacctctaggtatggaggatgtgttgaacaacttcctaccagtcagtgcagtgcagtgaccatttagcagcatctccctcctctctccttccaccccctgccccatctctccttccttgcatctatcttcccctgccaacaataattttcttatgttctaagtaaatatctttagtgctctccctactacctaaacattaaacttcaaacctttcccaagaccctgaacacccaccccagcttgtaagttcaggctacttaccattccccaggcacactgtattttccctcctctggtacactgctcatgtcatcgaatctatcttcctcccaccccatcctggattctgtaaatataaatcagtcctgcccacctttaagtttcagtcaaaacctgatactcatggcctgaagcaatccctcccttctccatgctggtctgagagaggtcatgatatttcagtagctctggagagacacatatggtcaaaccagaccagctaaaattaacccatgctatgcacaacctaaagaatcacctcttgctgtaacctctttcttctcttgctcaccaaaaactgtctgtcacatttgctaagtaagcccttagggctttgctgtgctggcaaaaggtcttaatccatgtgaatgtgcatttttgtgttagtgagcacatgctaacatgccttccacagattagtttcttaagaaacattttctgggggaaaaaagacctgtttttggttagtaaccccaaaaggacctttcagttcacatacgtggtagcagcatactccacttatgcaaaggtcagcccagggtaaatatgggcaaaaacacagacttaggataagaagaatgttaagggagtttacagtttaaagagatatccaaacaacttttttatattttaaagaagtaatgctataattttactacaaagaaaacttctttatatttctggggagaagaataggaagagttacaatctcctagagaaaagcaaaacatttttagtattcccaaataagacaggcacctcaactagggtgctgtggttgcacgttctttgtagtttttcaagaattttatttctctgtcatgattatttattggcagaagatttgttgggccaaacatgtaagactttcttaaacacatatagagaaaaaaattagatgattgcacatctttctgagggagatttttcccctatttttaaaagtcattgcttttcactgaatttgtcttgtattcctataaaagtgtaaattttgtgattgatagcatttttacctcaaaatgaaatgaatatccaactggagcaagttttattgactgcttattggagcataaattagtctaagttttcatgaaaataggcatttgaacatgagtattaatggctgagatcagaggcaagttttgaaaggattccaaaatattatcatattagataggcaagcaaatgaattgcttgaatgctagaagttcacaaacattcaaacaattgtgagttacattaacttcaataaaaacttttgcaggacaaaaatttaatatagtaaacttcatcttgcttgtccaggtccgtatacattcttagctggactcttgtcctagcttcctaatttttcttcctatctcctatttttccctattccaagccaccatactctgttcttgattaattcttcctgcctacctctgattcagtgattcatctgcccaatcatctatagtagctccaaactcttttctaaattatgaataaacttatctccctggcattcagaaaattcaacagcattcatcttacacacttttctagccttatctcccttttctcttatgtactcctatgtttatattccctgcagtcttgcttcattatatccatttacaatgacccttttaccagtaatttcctcttctttcctctcagtctgaaacaatccttcatagattttgtcctgtgagccatatttcaaatacaactttatccacaaagctttgcccagttcccacaagaggattctgcttttgctttagaattgtagcctttttttcctctctcgcaaggagagagagcgtagcaccgcagtttaagtactcagcctctggagtaagctttagtttaagacccagttctactgcttacttcctgtatgatcttctctaaattttatgatctctttgtcttttttttttcatctctaaaataaagatgctaatagtacctacctcataagatggttgtgagaattataagtgttgatatatttaaagtagttagaatagtatctggccctacagtaagcttacgtggtatttattgtattctcttatggctcttattttattccaatgtgtattaaattgaaccgtatgaaattgcccatgtcaactctatattggaccctaaaatcattatgtcttttggttcaaccaaatgtagtgctttttgcacccccccttaataaattgaactatctctaaagatagggacaatatcttacacatcattatatcctacagtacctgctacatacttgacatatgctgagtatttcacggatggttattgaattttgcacacacacacacacacacacactgcaaaaaataaacagaagccaagccctccccagtatcttaagtactctttggctaccagggagtttactccatgctgttcagcagtcatttatgaaaggagagtgataaagatatagaggaggagaattttatcttgtctattgctgagtataaatactatgcctttccgaaaagccttccacagaacctttccttcaggtcagggacctagtgtcatgggtcggtcttggataacgttgcaggacatatcagttcaactgccaagggaatcataaatagtcctactcctgcctgcggcccaccactgcctctctgctttcattcttttttatcagatattttcaacatcaagaacttattagctgataatttaactaaattaagtataacataagggaaatgtgtcctggcagagatggcatcttagagtgaatgcacagtctttattggttaccaaaaacaaaaaaaaaaaaacttgagctttggacaagcagtagagagcagatttgatactgggttctgacatggaagctgacattaaattattgacagtctacttgtttataaactattcaataaacaatttagtaagtaaacatagattcttgcaatcccttttaaggaaacagtgtttatgttggctctctcttgtacccaacctagtgctcagcctttcctgactcacataagcactaatctccagataacaccaagcaccctagggttattatttatcccccttccttgttctctgaaataagagaaaggcaggttaaattatgcactttatgtaagaagaaatggaggtacagagaaaacagcttaagtctcttaacagcccaagagagtgaagaagatattgccaatgcaatgagttgtatctgtccctaggtaagtaaaatattaattaaagcatacaactatattaataattaaaacaacagtctttacttatatggactttgcagtgacttttttccagcctgaaatactcagataatgactgccattagtttcacacgttagtgctttattatatactgctttgttttcacacaaaatcgttgagaggtaagaattttttgaaagaaatatttggtcttaacttttttatcccccttcaacttcaagcaattttctgagcaatgataagtggtaagtagatatttaccacttagtttacaagagacctgtttctctctgtgcattgacttaggcactattaatgaaacctttggaatgcaggtcccttctggttgtaaacatatactgaggtcttctatttcttttggaactcaaacaataagaaaatagttagaaatctgtttgtgggcataggtctctaaaagccttaatcttagaagtgagtaaaaaaaattttaggccagacgcggtggctcatgcctgtaatcccagcactttgggaggccgaggtgggcggatcacgaggtcaggagatggagaccatcatggctaacacagtgaaatcccgtctctactaaaaatacaaaaaattagccgggcgtggtggcgggcgcctgtagtcccagctacttgggaggctgaggcaggagaatggcgtgaacccgggaggcggagcttgcagtgagccgagatctcaccactggactccagcctgggcgacagagcgagaccccgtttcaaaaaaaaaaaaaaaaaaaaaaaattagagcctaagaaggatgattaagcatcttacttaaattttcagtatgcctatgtacactctatatactgacttctagcatggtttctttgccaaagcataacacacattttttaaagggataattcaagacaaacattctttcaccctgggtgaccccaatgggtggtgaacactttttagtaactcttgaaagttaaagcatccaacagttggttgtgacctttttggttgtgacctttgagttcttctagcttgtagcccactgatttgctgcttaattccacagcttcaaaaccaactctaatcactgctcccgagagagccctagcttctgcacacatgagtctctcaccaggaaaggatacctgaagtccagaaaagccctttgttcacactggctcctcctagtggggaacagtttttttaaataatgtacatttatgcactgggaaaatatcttgaatttattatttaggtgtaaccagactttaatacaacttaacctacacactgagaaagcagacatttacaaaaagatttatggctttgacaaagcgttcaaatgtagttaccattaaatagtagttcaagtaattgtgtgtctcatggcaaatacatgcaatataaggtaatatatatttaagccaaaaataacaagaggtgatcatttgctaaacaaagaacttattacttaggaaaaaatgttacacaactttcaaaggacttttgaaaatatagtatgatttataggaaatttatttgcatataattcacaatatctggtacaaggtaagctacctctgtgttttttttctttaggtcaacaaatatttaaaccaagggttggcaaacaggccctcagaccagatgcttgtttttgtaaataaagttttattggaccacacccatgcctgtttgtttcagattgtgtttactttagggctacagtggcagagtggagtagctaagacacagagcataggtccacaaacctaaaatatttactctctggccctctaaaaaaaagtatgccaaaccattctaaacagcaaagcaattaattcttttttttcaactcttattttagatttagggggtacacgtgcaggtttgttacatgggtcaattgcatgtctctgaggtttggtgtacaaataatccccttacccaggtattgagcatattacttgatgtttttcaactcacaccccgctcccaatcttcaccactctagtagtcccctgtgtctactgttgccatctttatacccatgtttatccagtgtttagctcctgcttataagtaagaacatatggtatttcgttttctgttcctgcgttaattcacttatgatgatgacttccacatacatccatgttgctgcaaaggacatgattttgttcttttttatggctgcatagcttttcatggtatacgtgtaccacattttctttatccagtccaccatcaatgcgcatctaggttgattttatgtttttgctgttatgaatagtcctgtgatgaatatatgagtgcgtgtgtcctttttgtagaatgatttatttttctttgggtatctacccagttatgggattgctaggttgaatggtagttctgttttaatttccttgagaaatctccacactgttttccacagtggctgaactaatttacattcccaccagcagctataatatggttgtttgtttgtttgtttgtttgagacggagtctcgctttgtcgcctgggctggagtgcagtggtgcgatttcggctcactgcactctccgcctcccaggttcaagcaatttgcctgcctcagcctcctgagtagctgggattacagtcgtgcaccaccacgcccggcaaattttttttatttttagtagagacgggatttcaccgtgttggtcaggctggtctcgaactcctgacctcgtgatctgcccccctcagcatcccaaatactatactgccccctcagtataatatagtattttaaggaactaatcatcaagtttgtactggttaccctcttttagtctcctgttatcttcaatttcataattggcattaatgacaatacagtgttcactttataaatttgcttcatagtaaactcttctgaaataaattacagtcatgcatcacttaacagtggggataggttctaagaaatgcataattaggtaatttcatcattgtgtaaacatgaagtgtactcacacaaacctggatggtacagtctgctgcacaccagcctttatgatatagtctattgttcctaggctacaaatctatacagcatgttactgtactgaatattctcagcaattgtaacacaatggtaagtatttatgtatctaaacatagaaaatgtacagtaaacatatagtattgtaatcgtatgggacgactatcatatatgcagtctgtcgttgaccaaaacatcattatacagcacaagactatagttgaaaattttaaattacatatgtgggttgcactgtatttctgtttgcagcattgatatatacatttaatggtttgtatgtttgtgcttgcattcataaatattaaactgttacagggagcatattttcttgtgtaaaaaaataaataatttttatttctaatgacatataaaattattatggttatgtttaaagaggcttgaagaggtattatggttatgtttgaagaggcaacggaaacgtcacctttgtcattgaccaaaacatcattgtgtggctcacgactgtaatagtgtaaagtaaggattcaatgtatcggctaatcaatgtggacatatcattcagtattattaaagatactccatccaatgaagactgaacacctgtaaatgcttggtgatggatggaaagggcaattatttgcagctggactgtctgagacgtgtcatcattattgcataatatttatttaatgaaggatcaatgcaccatacagctccagtttgagaacacacttgacattgtagtttgtagatcttttataaactaactgctatcactgaatttttgctgaagaataaagacaaaagattctctctttaggaaattgtgcactttaaagactcataaacctgaaacctcacagaatcataatagatgtattttcagagacaatttctgagtccttgacatattctcaaatgtcattcatgtcttcactgccgcaggttatctttttatttttatctgtcatggaaaagcagccttttttctttttttatctcctactatgccttaataaatagaatttaaaaccccgaatttgaattattgtgaaagccaatatttgtagcaaatccatctatgctctgtgttgtcagcacatatggttttgtgtacctgctaccatgaaactctgccagggttatcctcagagaaatggagagacacctgatgccatccttactctgacagaagtttttctttctgtgaattccaaaaacttttgaagttatgcatctcttgcattgaacttcagtggcttgtgtacacatggtatcttcctttctagattgtaagttctttgagggcagggactgaacctttctcatctttatatgctctgctcctccacccttggtttagccagggccttacaaaaagtagaagcttaaataatgtttattaggtgaatatcatactaagttccagaaattacctgagagcaattgaagaagggaagtgtggagggagaggtgttagcatagatttcatagtgtttgagtttggcagtttggcatccttttcctcaacactaatactgacacagataagtaacctaactgccttctcaaatctgagagcagtagatgcattttctcttttgggacttttctatctcatgtgggaaaagcaaacaagaaggtcctgcaaaagtcttgtgggtatttattcttatcagtggttgtggcaaactctcttactggtttcaattggtcccacaggctatgtgatgaggactttggggtttggggagctgggaaccatgagttgtctcttaagtatgacctaacatactgctaataccccacaagcttcaatttatccatctcgaaatggagatactaacatctatctcaaagggtcattgtgaggagcgagtaggaacatagaaaagttcctagcacaaagtagatatggaagatatggaataaggtgttaggtattttattatttttactgctgctgctgctgttactactactgctattattattactactcctggaagagtaggacttgcctgggacactgaccctacttaccccttcacctcattcaccaaaacttatctcctatataaattcatgtatatttttctggaaggataagaaaaatccttcatctaggtagcgtattttgtatttgaatagtttatgtttcaaatcccagagaaggcctatacagccaaatttggaaaaaaaataaatttaaaaataaatattcagtgtttcatatataataaaatacctaacatcttattccatatcatatatgtgtgtgtgtgtgtgtatcttttaattgccatgtatttctaccaaaaaatacaaaacttaattttgcgtcctgaaagaccctcgtttgagaatccctgcttttatgttctgctttagtccaggcaacagatagcttaggttgtcactttacaactggagcagcaggtagggctgagaggctcgccatactccaaattaccagtgccagtcccatggcaccaagacaggaaaggcaggcactcaaacagaaaggtagtgcaattaattgcttcaaattctttactcagggctgcccttagtcatgatcaaataaaatgtacacattgtttggcacttggtaaaatgttgtttcctttccttcctccttcccctgatagactctccttaggtacaaaaaagatgaggctgtacacagagctaaaagtgtacacctttgaaaaaggtgtctttttcaaagagcaccttcaccccttactggactaaactcaatccaaagctcttttctctaagctttataacacttactgcctggatgagtcatttgtcaataaatacagaatgtttgtataggtggggttcttgtatatatgtacgagcccctagagtctctaacttaaaatttatttttgctttagaagttcaggaataaggaggctttgatgatcaattttaacaaccgcaatatataatacagtaactaatggttaggtgtccaggctagcccagggcagcctgtgtgattcatgctgctggtgaaccatggctggctgggcgaactagatctggaattctgtggtgcctaagggagggaagggaatatttcccacactatctcatcctgccctcactatcgctacccccaatctctctctacattctaccccacctactttgctttttctgtgaaagaccagctggggcaaatattttggattaagtaaaatttgtcttgggtaacttccctaaaatttagtttttaattgaataatcttggttaatccatgagtaaataagcttgtagagtatagtcagcctcactgtgagaagctgacaaaccagaaaaccagaggaatatacaccaattccttcctgtcctgcaaacctctgcttcttgaggtttttaaagagtgggtgcctaattgattagtcattagttattgacaggaccaaagagatatgcctggctcctcttggaaaaaccaaaagactgagagggaaaagtacaccaaaaagatacctaaggaggcagactgctataaagaaaataattaggagaagaaatcatatgttttcagatgaaaagaatctgaggatgaaaaaagcagccttttcaggccgatgatggaaagatagaaactaaattcagaaggatcagaagacgattagaagggcaagaagtcatagaagaccaagatttcccaaattaccaaaagaaatcaagcccagtcttgttcaggctgcagaatgagaacgcccttctagtaagatccgtacaatgaatttcacaaatgttgatttctttctgtcctctttgagcccataatcacctccttctacttgcacaaccttgaccatcaccactacctataactaataaccagttcttatgttcccctcaaggcataacacaaaaatattttctttatgattactttctctacaaaaaagagggagagagagagaaacaagtcaggggacttcgttggtgagtgtagaccacagcaagaacctaaaatcctagtgggttgttagtatagacaggctgaaaccactatcctgaagtggtggttctaggtaggtatgcccatcagaatcatctgtggataagtattttcagtaaatacacatgcaggacctctacctcaaatgtactgaattgaacttcattgctggagcttaggcatttcatatttgtttcctaagctgctataacaaattaccacaaacttggtggcttaataagagaaatgtattctgtcacagttctggaggccagaagtccaaagtcaaggtatgaccaggattggttccttctggaggctctgaggaaattctgttccatgcctctctcctagattttggtgactgccagcaatctttggtgttctttgatttgcagaaacatcattccaatctctggttctgtcttcacttgaccttccctatgtctgcgattggtctcctttctgtctcttttaaggacacctatcactgaatgtagagcctatcctaatgcacaaggagctcaattataccttaattatatctgtaaagaccctttttccaactaaagtcatattcacaggtaccaaggtttaggacttgggcatatctttggaggatacagttcaacccattacacatatgcattgaagggaaaaattcacgccacaactgattatcctataaagaatgttggcttaacttaacgcatttaacgcaccatttctccagcacttaggaaatgctaggagatgcaaagctgaagctaaataggcttctttattgcagaacctctcagaggctctcatctgtttgtgtgcattataaatgtccaagagaaagaaaagaatcacaacatttcctggaaatacttgaccagggaacttcttttcaagggattacctgttaactacctcaatggacactaatgactaaaggaatacatgctgctggtgatcatggcacttccaaactatgctcaatggtgtgggcatgagtctaccacagtgtctaaacactaagattgttaatgtctacacgacctctccctggatatgagcacacatccttcatcaaatatccacagtggtttccctagaggatttgcatatgtgcatggatttttagatgtctagtctctactcttgtcttcagccatttttgtagagagaaattggcaaaatattagcatgaatggaagggaaaggtggccaagataatacattatgcctttttttttttccctgaaaacagcccagaatatctgaaaagggagaagtgacttaatcatttctattcccacaattctggtcctacaaaattgatatcagtatatgattcatccagagaagttcacagtggtatttttttaaaaaaaacttttagaggttaccagggcatctcactattttaaaatttaatacctcaagggaaataagcaactaccttgaatttttgcatgaattgcatttgagaataactgaatagttggtggaataaagttgtttttttaaaagtaggcatattctagttaataaatataaaagaaatggtaggattagaaaaatcactacattacaaactctaatgacataatagatttaagcaagatgatcagtgaatgataaaatatttaggtatgctgtcttctaggtgaatcaagctgacaataccttggacccacgttaatcttaccacatgatattatatgtctcctgatacttaaaataaatatcaaataaatcttgataattgttgaaaattgttgatgaacatatagttcacagcaccacccatgatgtattctttccatgagaattgatctgaatcaaagtaagcctctaggtctaactgccagtgtgtaggaaataccagggatagagaaacatttttaaagtctttaagattgcagtaagctgaaagaaattgtctggtttctgcaataacagcaacaaagttatgtaataagaagagagagggagaatcacggatttatacaaacttaagagacactgtgtgaatctagtttgtatcctgatcaaacaaattaactgtcaaaagatgtcttttgaaacatgatgggaaatttgagcataaactaagtattctacgatattcaggaatcattaccaatttgttagatatgatgttggtatgtttttttaaatgagaaagtttttagcttttagagatacatacctagatagttatgggtgaaagcatatcattaaaaaaaagatagtggaagtacacaaaacaggattgctatatgttgataattgttgaaccttggtgatgaacatataggaattaattaaaccatattttctatttttatgtttattttgcaaattccaaaataaaaatagaataatccctcatgaacagatggtctcaaatttcatcctcaagtaaacacaattcacattctcaggggaacccatgagaatattatgaagtatatgtctatctcatttcattatatatggaatcctaccattccttttgtctttattactagtggccagagttctatcttgaaaggtgggaaatgtccttatatgaacagattagtttagagaattattgtgagaaaaccagaaaatatttgagttctagctaactggatattgaatgagttgtgctgaagtatgtggtcataaagggttgataatgaaatacttgctttccagtggcaaggaaaaataaatgtcttagaatttacaaggtcattcttgaaatcaatcaacgtgggctgaagatctcattgcttctgttatctggcacgatggtatttgtttgtgcacagctctgttgatgtgagctatcaaatatttcttagagctgaaatcatctaatagcaaacattgctatgtcccaatggagattccaagactctttggccatggaacatttacattctatcccctttcatcactcctgaacaaacaaaaacaaaaaaaggaaagataaccaataggctttttatttaattgaaaaccaaagagagagagaggaaagaaccagttagttgccattttctaaatgcaggcttttgtttgtttctgccttctaattctttgctcttgaagctatagctttcaagcttgtgtatacaggcccagagagaacatttgaaatgtggccaccctacccatgtccatgccactcttcctgcctttctctctgcctacttctgctccaccatcccaggtcaggggcttggaggctgacagcattacaagtaatatagtcgttcaagctcatataaacaagatgaaatccaaataataaccaaaatgtattttatttcaaggactggactactcagttccctcagtttcgctgaccgatttctaggagccctaggctcagctcttggttgtctcagaactgaggagagtactcatttgcaccatatgcatctgcttgttagcctgtgctaccaaaattgattcattacttggccttctctgaaaagaaaaatgaaaacaaaaatgcactcttaaaaataattattaaaatacaaccaggaggtatgtgcctagacatggctcaccttctaccaaatcatactttatgattttccacaatattatcttctattcctcctgcccctaaggttccatggagcagagcaagttgaagaatgttaaggttttactaaacttttagaacagaggctttggggaagcaagagagaggtacactgaaaatgaagtgtctgtctctgcttctattaatgtcataggactagaagttgacctcatagctgattacaaatgaaccctgcaaattgaaccccagcacatgcctctcattatccattcttctctttgcaggatggggtccatgctcacatatcaagaaaatggtgggtttcagtctggctcactgggtgaggttttggcatgaaaactaatacgggttagtgtacatcacccataataaaagtaaaagcttttttttttatttacccaggtaaataagcaaaaggcagatctaaaatacattagagttaagttccatggggacagaaatgtctgctttgtttgttgttatacaattgacacctagaatggtggctggaccatagtgactacaaataaaatatttcttaagggaatgaatggttctgcaggatagatgttctctgcatttggataagtgatgatactatagactcagagcctagatagaaaatattgtcccactttcagttctgcaaactgacttgaggtgcttggtgacgtcctgcagcaagcaaaccaaatgaaggcatctctgagaccccatagtcaccaccagcatgctagcctcccattaccttgcccaccctagattttcaaattgggaatcactgtggtaccagactgggaatcgtgacttgcatactttctcatattggggcttgggattttgagatcttatttccttttttggcttcttgagatctgaaattgttgttcagagaaggatattaagacaatgactcttccattaccatgcatttctgttaccaacagaggaggtaagtgaatcacttaaaatgatacaattccatccacttcagtacaccataaacatatccttagctttgactataattatagtatgtgggtgatgccgctgagaaaatggtataattataacattatggttgagaattgtctgagtagaaaacactgagctgtactgtgcaaagtttaaggcggaattgtgggtcccttttcaatatgaataaaattgattagccaattgcaactgagagctttgtgcaatgatattaataatataaaaatcggccgggcgttgtggctcacacctgtaatcccagcactttgggaggccgaggcgggtggatcacgagatcaggaaatcgagaccatcctggctaacacagtgaaaccccttctctaataaaaataaaaaaatatagctgggcgtggtggcaggtgcctgtagtcccagctactctggaggctgaggcaggaaaatggcatgaacccgggaggcagagcttgcagtgagctgagatcctgccactgcactccagcctgggcgacagagcaagactgcgtctccaaaaaaaaaaaaaaaagtcaagggccaaagtaacaatgtaggaaaaatttgatgactttaatttcatttacttctaggagtcttacatgcaagcctaatgcagagtagagaagctcaccaacttgaaggaagcatgaatgaaattacaaggaaatctagcttagaaaaattaaccctgtagcttggtttttccactctttgctcttggcaaaaggatcttacgtatgtataccaaatgtctatttgaaaattttgtttctctgaatatagctttcttttctctttaacacactggtccagtggttctagattttatgctcccataaattaagtaagacagcattctatatcatgactgaggtgttaatgacattatgcagttgtcacattttgaaatataaacttaaatgcgagcttttcactgtgtgtaaagtttctctgtatttttttaaaaaatttttaaagaccagagattttcagcaacaagaaacataaagaagtaaaaagagcgtagaaaccctgccctagaggacctgctccaccacttaaaagccatgtacctcttgaagcctgtttcctttatttccaacacaggaatttttatatttacaccctaaccatcacatgggtcacatgtgataacaatgtgcaagtttcttacaagtgttctaggaatctgtaagtcttagagttctgaggtttattcccaaaggacaggaaattgtgggttacaccaaacagttaaacagggtggcagggaatccctgtcacgtacccaggcctttgggttattttctagggtgaggggacatggccagtagtacaaagagcatgtgaacgcatggatgtgggtgtgtgaggtcatgagtgggtgtgtatgtttatgtacaacacatgtattggaggataaaagggaaaataatttgtcttcctgacttcttctctattcctggcttttcttagattgttattcctctctaaacaaagcttcaaaacagaaacccctccccttctttattatatcggaaatctgggaattcagttatccttgtcttatcctactccctgttctgttctaaatatataataacaataagtaatagtactactactagtactagtagtagtagtagtagtagtggtggtggtagtaatggtagtaatagtaagaggatgaaaagatggaggaggtgaattggaaatagggaggtttcctgtagctgactgacagtttatatagcaaccgcctgcagatttaggttttttctgactgcgcttattttatagcaacctcaacaagctgtgacaacctgcaatatctttagcccttaagatactgtctcttaaacctgaccaatatttcttatttctcaaagagtaatgatagtcttttctgtctgataagttcaaaaggcacaactgattttcctaacattttcctcaaatgaagggagtatttgaaaaatggaactcaaatgaggagccacctcagaagcctaactggagcattcagactgcatcagacagacttggcttcagttctgacactgatacttactagctgtgggatttttggacaagcttctcatctgtaaacaagtataaatactacctactttataagctcgtatgaaaattcccacaaagtttgatgttagtttcctttctttttgtgctcagctctaaaaatatgcagtgtagtgagtcactaatatttcattaacataagggaaaactatatacccaacccaaaagctgagattcttcagaacattttttaaagaggttctaattaggaattttataaatggaatacagagtactttttaaataataataacaatgattaatttaagttactaaacaaaataccttaatgaatttgagaaaaataaactgaagataaatattaattattaaaagagaaaattattaaagtaataacatgcaagtcacttgatacttgcaaagtaacacagaattagacataaagccacatttaagaggcagcaaagccaaaatggctggccccctttaaaaggctcttggcaacagacatatggaaaactgtcatctcttccctgggcctttcttcctactctggataagcagcatccttcacacaaaagaacatccaggataactaagaaagagatgaaatgatttatcggaactagttaaaataattaaatcttaaaagcatgttctcctgggcatagagtggggtgatttctgcaaacattttgaaaataaagtacccctaaaacaaggatttggtttaactgctagaaaacaaggtgacaggttgagaaaactgaaaattttcttaaaatcttgtttacttgaatggtgagccagccacccagggaagaaaccagagctctttcctttaagaaatatagacttcagttggaagaaaaaattagtaggttttaaccttcaaccttctagtgaagtgagaatattgattgagcacctattattagaataaatttatcttaagtgacccagggaagggtcgtgggtgacgggaactgtcaagaaagaaaaaaaatatggctgtggatcttaagtacttaaaatctactgagggctcttgtctccattttccttagaccgtgatgttgctcaaagtcacataagagggcacataaatttactgaatagtattacagaaagcagcagtgacactgaaatgcttgcattatattcactatcccagtcatctgcagttgcctgagggatttgcaagcaaggacaggaaaatgctagtaccaaccagttctagataaagaatttatttgctccaaaaactttcactgtattaaattaaattagattggctggaattaaaaggtaataaggcccattttcttatgtaggtcatcaattaatttaactctaaagataattccaaaagaagaggtttaaaaattgtttgagtagtagtaacatcattggaatttatgtaaaacttcccaatgtactcacttttacagataacatatatatatatatatatatatatgtatgtctatgactgctggcataatgatcaaaatgatcagttttattactttgtaatcacatcaggcggcactgatggttgaaataaaatgtgttagatgagtgaatgcaaagataacatatagcaaatgaaagtctttgtctatgaagcacatgattgttataattgttgctgcccttttgggatcctgaaccagattccccaaataagtaggtaacacagaatttgtcttgagcactttttcaagcattgtaatccatgcattgaagtaggctttatcagcctacagctataaactccaaggtgattttaaagtctgaaggtttataggtcttcattaggataagctgggcttaccatataaatctatgaggactttgctagaaaaatagtggaattgttgaatagggaaaagagataatggtaacgggatttgcctgatgtcttcatcctagaaaaaaagatttctgcttgggcattaaggaccccagtgatgattctgggagactttcaggaatgctgacaaggctggagctactcaggatttgatgccaaagaagccacactgcacatgtgttcctctaaggtgtacttggttctcatctgagaggcaaaggctctacttctttttaattgtttggtcctaagttaccttcaaactccacctaaccacatctctaatcctgtgtatagcctttccaacatcttgtaaattccaaggggttgggggaacctttaggttccaaggctgagctaagttataaatgaataccctgtgcagtgttgagaatgaaacagaagctttggtgcgtggtagcccactgtgagtggggtttcaaaggagcagtccaggggccctacatgaataggcatatatgggccaagagacaggcttctctcagccataccatagtatactggaacaatgagaaatgggagaggacatacttcttaaagtgacacactgacctgttttcattctctcctctctctgcttctccatttccacttattgcccctattgcatctgtccagtaactgtttctttaacagttttccaaactgacattattaatccagaagatggatggtggttttttaattaaaagagaaagctgattttatttggtgagacttctgctatcatcttcagtgttatatcccaatatgagtactttttttaatgttctactaaatccaatagtatattcacctcactctcgagttaaactcttggctttaaaaaaattagccagaaaaacttcttaagaaaaaatacagtattttaaattctataaatgaactatatcttaaaatatttgggggcataattcaattgtatccattttactttaagatcatgcaaaaagggaaaggtatagatgctattttattgatatgctgctccatggatttcaaattcaacatcataagccaagatttgtgggaccagaggaatgttcaaaagtataatctgatacattatctgctgcaggaattaagtaaaatattgcatacatctcacttcctataccaaatagagagaatgaaagtactagattttgtattacagatagtttagacaactatagggaattctgaactttcaaacttttatatcctaaactcaagatttgggccttgaaaaataaaactgataaaactgctacagtgtagatttttaaaattacattcatgtggtgaagttgacactttctgttggtatggctagaagtcagatagatgcttaatttgaaagaccatgtttttatttcttctctttttcttaccctatgatttcattgacctgaagtggcttttagtgccattcaattcacacagaagccaaaattggttactgtgttaagaagaaaccaagatgttttatttagtttatgaaacactagcaaaattactatttgatgcaaaactgtgaggaagttttgtagtcattgaaaggagcaagaatatagactgcttgcagttccagtgtcgagacattcattatcagatttaccacttgaaaatattatcaagatagtatttatattgtgtttaccaggtaaactaagcactttagttctgagcactttacatattttaaatcattaatagtgctgtaacaagcctctgaggtaggtactgttatccctctttaacagataaagagactgaggcacaaggaagagaagtgacttgctgaaatcacacacagctgaatgtggaccctgattcaaatccacacatcctgactcaagcatccttgctctgtactactgtgctacagtgcctctttacatcctcctgatgtagaaatcttcttctagaataatgagaagcagtgtgaactttgaagtaggacttcctgggcatggtgctttccatctctgggccaaagttttctcatctttacaaaaggattacgatcaacccccatctcatactgtggttaggagaattgagcaagaccatatactaaaagatgtcagaacagggcctgacagatcatagtgcccaataaacattggctcttgttatcatcataaatatgttaaaatgagctttagtatgtggataatagtagcagaatttcctgaatgagacatgttaaacatttattaagcaggcactttttggagtttatcttataataattcagtaaggttactcttgtcatccctatttcactgaatttgaggaatctcaggctgcaagataacgtattagttttctagaatcaaataagcaaggattcaaactcaggatatattgaccccaaaacctcagatctttctgccatccctatcttgttctaaaccccaggtttgctcatccgggccctagtcattgatcaaaaagcaccaatacaaatcagagtagagaaagtcatattgagcttgtgaggttgtattatgggcatggtaacaaatgtaattcagctgtattggcacagtgcataacaaccacacttaatttctgtcctaagacctgtctgagcccataaataaagttacattaataattacggaatggtaagggaccactcagaaaatcttggttgatataggaagtggcatctgtggcttctaattgagagatattgcttcttgaatcagtgctagaccattgctctagggggatattaagccttctctgtccatggaagatgtgaaattcaacagctgacctgactgcttgtcgctgttgatgatcctataaaatttcctctaagatacgaactctgtgttctagtccaaatcaagtgaatatttcctgttggttgacctacaacttcaagggtatgaggtcataagtttaaaaagattccttttctccccagtgttgtaagagttattttagttctatcaaatgctcccagtgagtactgcatatttcctttttgccagatacattagctattcactcttttttcctatctcttctatgcttttattttttccctcatctgtttaaccaatggtaccctgaattttagaaccagacaggtagtaggacaaggcaggtgaaaatgcacaggttgtaaatttcagaatgcacattcaaattccatcgttgtctcttactaactgaatgaatgtaggtaagatgctttacctctcagagtcttacttaccccatctataaaatgagaataatacaaactgtcttctgtggttttcttgagcattaaacgtctctatttatggaacatagtttcacatagtaactgattctgtaccaatgccctgccccccatgtaggcaaatgcatgtcccgaaagacccaaaacaagttgtccctcttttcaagatgaagatttgtaatctctccttaaacttatccagttctggtgtttaatttcctttataagccagaagttgttttacgtctcaccaaatcttataacatgaatattacactgtcttccaaatgtgagcctctaattaccttaggccaatagcagagcctctgatcttgtcttttctccttttccgcttaccagacagcacattctgcctgagagttgagacccaaaaagatataaatcaactagggggcaaaaatggagtttcctaagcttgtcccagagtttgactcagtagcctgaggtggagttcaggggcttgatgttaaaaacaagctaccccagtggttttgctgcaggtggaccagactcccaagaccacattttgcaagcactggcatttaggaagagcacgtacctactctagcagagtttatgcagactatgattgcagcctagtttgtgcagactattgattgcagccacttggcaaggctctataagaaaaagcgagccaacatgtaagtaaattatcatggccttgaaactcctcatctgaaagggtttcctctcatcccctcatccccttgtgtctgcccctgaatgccagactatcttctccagccccaagtcaacctctcatttttaagccattcctcattctcctatatagtccaaaatagcgaatacatttttaggaattctcttgctttatggacgttcatccaaaaatatttcattatgagaataagtgcttagcttatcctgtagtgtctttctgctctaatatttgggcccttcctttccacatagttgcattttctttgacgggcagatgctgctcctttaatatttttcacacctttgtgcttctaacagagcaattatttcaggatgagggcacttggagagctgtaagaggataaggagcccagggctctgccttggatttgtgtacctaaatgttacctaattagataaacctgaggaagatgtggaagcaaagtagaatggaacagaaagtgtttgaataataagaatttggacattgctgctccgtggtgacattggcagactctaagcctcttgcctcattttattcattcatgtatgacggggttatgctcagtcataagtcactaaaatttgtattctacatcccattagtaaagtaatttttgaacacatgatacatatgtttacatatttgtaagttatatatatgtacaaggttctaatatattctgttcattgtcaaacataaaatatatataaatttggtttaatataaaatataaaattggcattagtagacactgtctaccgaaatgagacactgtctcatttctgaaaaaagcacaatgtatactaagttaaaggttcattcttaacagcagtaggagtagatctttatttcaaatagtctttgggataatttcctattttggaagacagcttatcagatttggttagagttgatgaaagcttattctagggttaagaaaagtattagcccagccattttcttattgttgatttgggcttgcataattagttttaccttcagtatgaagtttctttacatgaatctttttaactcacttatttgttatacaattattagttaaatcaattttaaatcagtataatctatccacaaaatcagtcatacagaacctgcaaaaaacatgttctaacatgttacatgaagaggtaactaaagatactacaaacaacccctctgaacggtaacactcccactcttcctgcaaaattcctctcatagcaaatgcaacatgtgactcagacacaggctgactgaaggctttatgcaactcttacatgctcaatattagaaaactttcatttgtttcctattttatataaacaacacatataaataaacattttagtatcttctcattacccagtggattgtcttgcatggtccattttgaagacagtaaactgtagcctctatttttatttaatttcaaatacctgtttgccaatattcacagccagctcttgttaatgttcttttctgtcctgtgaatcctgatgtcgtatcttgcaacatcacctctaaagcctatctttgcactcctgtccatcccccattctctattattatgctgcctctgatggccagagaaaaaaatcttgaaaatatatattgtattgccctacctggcgaggaatcagcagttatacaattcaaagttgcagcaattcaccacattgtttagcaccctactatgtgtaaggaggaagcttgatttaaaaaatatatacaatcatgccttcttcaagaatgttttggagcatgcaagagcttaatgctcatggacatttactttattccagcaaatttagacccaatctctgtgtagtttcattttgttttccatttcctgattaactgactatatatctagctacttatttgctgccatctagtgtaataaagtatgttgattatacaaggaattttgagcccattatgtagttgaatatcagtactcaaaatgattctttttttctggtttcttataagtttacaaaatgcctagtcagggacctttcttatcactgtaaccctgaacatggtcttaatcttgtgtcatagaatctagggctcaggatcaaccttcgttcattttctataaatgtgacatttggaaactgggtaggggcttagcagttggtggatatgaagtaaatatataagagtaatcattaagagatcatctcagtttagtgaccatgattttttcctcatggaggcagcaaaacacagcatggattcttaccagtagtgtgaccatgggcaatttatttctctcttggaggcatcattttcttcatatctaaaatgaaatggtaggtccaggtgactgttaaggtctcttctagctctaagagtctgtgtctacatataaatgattttctctgccaaagtagtgtttttagagtcctttttaatgccagaaatgaatacggcttctctagttcttctaagtggccatctatcctttggtgatggttagaagtaagcagagatcctggctagaaagagagagaggaaaatgtggaccatgattttattccttttattcttgagagttgtccaatgggatattgtccactagtggataagtagatacttgccaatatgcacctgacctcttctcttcactcataatgggaatttagaagtataatacctgttataatcaacttcctaatctctatcccttttttgtcactctatttcctactgtaacttctctatgaagtactataagtctacagtaacatactggtgtttccctttccttatgaagttttatatagctactccagtatatcctaaaatgttcctttttcttgcttttatagtggagtcttgcttgttggccaggctggcctcaaactcctgagctcaagtgatcctcccacctaatagtagctgggtattcttctgagtaggtggtcctaaaatgttttattttcagcttatttcataggtataagtcttattttcccaaccaggctgaaaacttttcagaatcaggacttgtctttagtttctcattttttatgaggggatgtggcattattgcttagggaattcagatatttctgataataaagatgcttttctgtttgttcatataaattagggtaaaagaggaagtacaaaactatctcaaatcaagtacaggactcttaattattactagctatctaacagctcatagaaaccgataagtttctgaacctaatgccaaaaaaaagcaaccttaccataaaaagaaaatccaaataaaactgaaagaggcagtgggcagtgctacctatgggaagaaaactttgaagtgggaaaaatctggattcacatcccagctttgctacttattacctttgtgttttggctaaaaattatctaactttcctgaagttaagtttccttctctgtaaaatgagggttataataatatatacagcatactccacagaagagttgtgaagatggaatgagaaagcaaatggcaaaaacttagcacaaagtaggagctcaatcaatcatggttaaaaagaacttttatccattgttatttttgcttatatacagtaagaattatccaatgcaaatgtaatcagagcatctgcaattgagctttataaagtgaattataattctcataccatagtggttctcatcaagggtgatttttttccccccaggggacatttggcaatgtctagagacattttacttgtcacactggaaaagagggggtgctactggcatctagtaggtagagagtaggaatgatgataagcattctctaatgcacaggacagcattccacagcaacaaatgatctgatccaaaataccaatagtgtggaagttgagaaaccctaccataaagcctagggagtccattacttctgacctaaatttgttttatatttaagagtggatgtggattaaaagtagcttccattttggtaggttatgaagagagttgtctaatctgtgctttagattctaattttgaggcatatttttaggctaaggcattgcaatatataaggctttctaagtttcagacattttcttggaggtcaacaaatgaaggcttggggatctattaacccactagagtagtgtaataatggtggtggttgtttattgaagactaaccaagtgccaagtactctataataatctgatttatttttcagcaactgtataagcaggtattttgctctcattttacacaggggaaaactggagcttagagaacttatgtaacattactagcaagttgcacagctgggattcaaactgaaatccagctagcttcaaagactgtgttctttctgctgctgcatactacccctacctaccaaggctctgagattagaaagcaggatgggtgtgttttaaaggaaataaggtaggaaagttttcaaatattagaaactctgcacaagaagattaggtcaagtttcccactgaggggcccttgagtatctatgaactcgatgaaaactctgagcttctcaggaaggtagaccaaagggaaaggattcatcaaaatggatgttagcactatgccatgtgtattactccatcctcacacggccaaaaggacatacctgagactgggtaatttgtaaggaaaaagaggtttaaaaaagttctcttcgatggccaaataggaacagctccggtctacagctcccagcgtgagcgacacagaagacgggtgatttctgcatttccatctgagctactgcattcatctcactagggagtgccagacagtgggcccgggacagtgggtgcagcacactttgcaggagccgaagcagggtgaggcattgcctcactcaggaagcgcaaggggacagggagttccctttccgagtcaaagaaaggggtgacagatggcacctggaaaatcgggtcactcccaccctaatactgcgcttttctgacgggcttaaaaaacggcgcaccaggagattatatcccgcacctggctcggagggtcctacgcccacggagtctcgctgattgctagcacagcagtctgagatcaaactgcaaggtggcagcaaggctgggggaggggcgccaggcattgcccaggtttgcttaggtaaacaaagcaggcgggaatctcgaactgggtggagcccacaacagctcaaggaggcctgcctgcctctgtagactccacctctgggggcagggtacagacaaacaaaaagacagcagtaacctctgcagacttaaatgtccctgtctgacagctttgaagagagcagtggttctcccagcatgcagctggagatctgagaacaggcagactgcctcctcaagtgggtccctgacccctgacccctgagcagcctaactgggagacacccctcagtaggggcagactgacacctcacacggccaggtactcctctgagacaaaacttccagaggaacgatcaggcagcagcattcaaggttcatgaaaatccgctgttctgcagccaccgctgctggtacccaggaaaacagggtctggagtggacctctagcaaactccaacagacctgcagctgagggtcctgtctgttagaaggaaaactaacaaacagaaaggacatccacaccaaaaacccatctgtacatcaccatcatcaaagaccaaaagtagataaaaccacaaagatggggaaaaaacagagcagaaaaactggaaactctgaaaagcagagcacctctcctcctccaaaggaacgcagttcctcaccagcaacggaacaaagctggacggagaatgactttgacgagctgagagaagacttcagacgatcaaattactccgagctacaggaggaaattgaaaccaaaggcaaagaagttgaaaactctgaaaaaaatttagaagaatgtataactagaataaccaatacagagaagtgcttaaaggagctgatggagctgaaaaccaaggctcaagaactacatgaagaatgcagaagcctcaggagccgatgcgatcagctggtagaaatggtatcagtgatggaatatgaaatgaatgaaatgaagtgagaagggaagtttagagaaaaaagaataaaaagaaacaaagcctccaagaaatatgggactatgtgaaaagaccaaatctatgtctgattggtgtacctgaaattgacggggagaatggaaccaagttggaaaacactctgcaggatattatccaggagaacttccccaatctagcaaggcaggccaacattcagattcaggaaatacaaagaacgccacaaagatattcctcgagaagagcagctccaagacacataattgtcagattcaccaaagttgaaacgaaggaaaaaatgttcagggcagccagagagaaaggtcgggttacccagaaagggaagcccatcagtctaacagctaatctcttggcagaaactctacaagccagaagagagtgggggccaatattcaacattcttaaagaaaagaattttcaacccagaatttcatatccagccaaactaagcttcataagtgaaggggaaataaaatactttacagacaagcaaatgctgagagattttgtcaccaccaggcctgccctacaagagctcctgaaggaagcactaaacatggaaaggaacaacaggtaccagccactgcaaaatcatgccaaattgtaaagaccatcaaggctaggaagaaactgcatcaactaacgagtaaaataaccagctaacatcataatgacaggatcaaattcacacataacaatattaactttaaatgtaaatggactaaatgctccaattaaaagacacagactggcaaattggataaagagtcaagaaccatcagtgtgctgtattcaggaaacccatctcacgtgcagagacacacacaggctcaaaacaaaaggatggaggaagatctaccaagcaaatggaaaacaaaaaaagtcaggggttgcaatcctcgtctctgataaaacagactttaaaccaacaaagatcaaaagagacaaagaaggccattacataatggtaaagggatcaattcaacaagaagagctaactatcctaaatatatatgcacccaatacaggagcatccagattcataaagcaagtcctgagtgacctacaaacagacttagactcccacacaataataatgggagactttaacagcccactgtcaacattagacagatcaacgggacagaaagttaacaaggatacccaggaattgaactcagctctgcaccaagcggacttaatagacatctacagaactctccatcacaaatcaacagaatatacatttttttcagcaccacaccacacctattccaaaattgaccacgtggttcgaagcaaagctctcctcagcaaatggaaaaaaacagaaattataacaaactgtctctcagaccacagtgcaatcaaactagaactcaggattaggaaacccactcaaaaccactcaactacatggaaactgaacaacctggtcctgaatgactactgggtacataacaaaatgaaggcagaaataaagatgttctttgaaaccaacaagaacaaagacacaacataccagaatctctgggacgcattcaaagcagtgtgtagagggaaatttatagcactaaatgcccacaagagaaagcaggaaagatccaaaattgacaccctaacatcacaattaaaagaactagaaaagcaagagcaaacacattcaaaagctaggagaaggcaagaaataactaagatcagagcagaactgaaggaaatagagacacaaaaaacccttcaaataattaatgaatccaggagctggtttttggaaaggatcaacaaaattgatagaccactagcaagactaataaagaagaaaagagagtagaaaaataaaaaatgataaagaggatatcaccactgatcccacagaaatgcaaactaccatcagagaatactacaaacacctctacacaaataaactagaaaatctagaagaaatggataaattcctcaacacatacaccctcccaagactaaaccaggaagagttgaatctctgaatagaccaataacaggctctgaaattgtggctataatcaatagcttaccaaccaaaaagagtccaggcccagatggattcacagccgaattctaccagaggtacaaggaggaactggtaccattccttctgaaaccattccaatcaatagaaaaagaaggaatcctctctaactcattttatgaggccagcatcatcctgataccaaagcctggcagagacacaaccaaaaaagagaattttaggccaatatccttgatgaacattgatgcaaaaatcctcagtaaaatactagcaaaccgaatccagcagcacatcaaaaagcttatccaccatgatcaagtgggcttcatccctgggatgcaaggctggttcaatatttgcaaatcaataaatgtaatccagcatataaacagaaccaaagacaaaaaccacatgattatctcaatagatgcagaaaagttctttgacaaaattcaacaacacttcatgctaaaaactctcaataaattaggtattgatgggacatatctcaaaataataagagctatatatgacaaacccacagccaatatcatactgaatgggcaaaaactggaagcattccctttgaaaactggcacaagacagggatgacctctctcaccactcctattcaacatagtgttggaagttctggccagggcaattacgcaggagaaggaaataaagagtattcaattaggaaaagaggaagtcaacttgtccctgtttgcagatgacatgattgtatatctagaaaaccccattgtctcagcccaaaatctccttaagctgataaacaacttcagcaaagtctcaggatacaaaatcaatgtgcaaaaatcacaagcattcttatacaccaataacagacaaacagagccaaatcatgagtgaactcccattcacaattgcttcaaagagaataaaataactaggaatccaacttacaagggacatgaaggacctcttcaaggagaactacaaaccactgctcaatgaaataaaagaggatacaaagaaatggaagaacattccatgctcatggataggaagaatcaatattgtgaaaatggccatactgtccaaggtaatttatagattcaatgccatccccatcaagctaccaatgactttcttcacagaattggaaaaaactaccttaaagttcatatggaaccaaaaaagagcctgcatcgccaagtcaatcctaagccaaaagagcaaagctggaggcatcacactacctgacttcaaacaatactacaaggctacagtaaccaaaacagcatggtactggtaccaaagcagagatatagatcaatggaacagaacagagccctcagaaataacactgcatgtctacaactatctgatctttgacaaacctgagaaaaacaagcaatgggaaaaggattccctatttaataaatggtgctgggaaaactggctagccatatgtagaaagctgaaactggatcccttccttacaccttatacaaaaattaattcaagatggagtaaagacttaaatgttagacctaaaaccataaaaaccctagaagaaaacctaggcattatcattcaggacataggcatgggcaaggacttcatgtctaaaacaccaaaagcaatggcaacaaaagcaaaaattgacaaatggggtctaattaaactaaagagcttctgcacagcaaaagaaactaccatcagagtgaacaggcagcctacaaaatgggagaaaattttcgcaacctactcatctgacaaagggataatatccagaatctacaatgaactcaaacaaatctacaggaaaaaaacaaacaacaccatcaaaaagtgggcaaaggacatgaacagacacttctcaaaagaagacatttatgcagccaaaaaacacatgaaaaaatgctcaccatcactggctatcagagaaatgcaaatcaaaaccacaatgagataccatctcacaccagttgttagaatggcgatcattaaaaagtcaggaaacaacaggtgctggataggatgtggagaaataggaacacttttacactgttggtgggactgtaaactagttcaaccattgtggaagtcagtgtggcgattcctcagggatctagaactagaaataccatttgacccagccatcccattactgggtatatacccaaatgactgtaaatcatgctgctataaagacacatgcacactatgtttattgcggcactattcacaatagcaaagacttggaaccaacccgaatgtccaacaatgatagactggattaagaaaatgtggcacatatacaccacggaatactatgcagccataaaaatgatgagttcatgtcctttgtagggacatggatgaaattggaaatcatcattctgagtaaactatcgcaagaacaaaaaaccaaacaccgcatattctcactcataggtgggaattgaacaatgagaacacatggacacaggaaggggaacatcacactctggggactgttgtgggggtggaggagggggaagggatagctttaggagatatacctaatgctaaatgacgagttaatgggtgcagcacaccagcatgccacatgtatacacatgtgactaacctgcacattgtgcacatgtaccctgaaacttaaagtataataataataaaagaaaaaaaaagaaaaagaggtttaatggactcacagttccacatggctggtgaggcctcacagtcatggtagagggtgaatgaggagcaaaagcatgtcttgcatggcggcagaaaagaaagcatgtgcaggggaactgccctttataaaaccatcagatctcatgagacttattcactgtcatgagaacagcacaagaaaaacctgcccccatgattcaattaccttccaccagctccctctcatgacacatgcggattatgggaggtgcaattcaagatgtgatttgtatggggacacagccaaaccatatcaccatgacatacaatttgccgattcagcaacagttttcaggtcttctatttttaagcctaatgcaatatattttatgaattcttcctatttatgtttttccttttaaataagttctactatcttaactatcactttcaaatataatgcaagctacatatgccattttaaattttttagtagttacatttaaaaagagggtgaaattaattttaacaaagtaggttatttatcccaatatatccaaactattatcattttgacatgtagtgaagctaataaaagcattcattgttaatgatctatctcttacattattttttcctaataaatcttcagaatctgggtgtgcattttaactttccagcacatctcaactgggatgtgaaattttcagcaattaaagtgaaatatagccctatcaaaactattaatgttgcatttaggaaaaagatatttttcactctttttatttttaaatttgagtttaaattaattaaaatggaataaaatttaaaattcaattctctgtcacactagccacatttcaagtgctcaatacctacgaaagacccatggctaccatattggacagcacagatctaagctcttattgctcagaatgtggtccccagagcagaatcaacagcatctgtgaacttatcaaaagtgcagtatttcagttcacacctactgaatctgcattttaacacaatccccaggtgatgcttgttcacatgaaagttgtgtctctctaaatcgcagatcttttcaacaaagagcccagaaaaagcacatgaatcaataactgtgaggaataaggaaacttgccacaggagaatggtgccagggttggcattaatgatgtgctctggtgaaaagtcgtaggtttcccacaaaggcaaccatggctattctattgtttgaactgacacagagccattctagagcttggagttggctctgctcccagaatctacatcaaagaatctaacactaacttccatgactaccacaattaaggcagctgcacaccccaccactatatatatttgaaattgcaactttagaacccctgtaacacagccgtgagcatgtttctgctatacacaagtggaatttaaggtcgaacctccctgggagaccccaggaagatcacccacaagagtggcttttgttgtctgcctcactgtcatcctctgagagctaacacagacacagtcaacatcctcttatatggaggttggcccagatgcccctggggattcaatgtattctgcttcacctcactaatccttatttggtttgtttttcacagaactcagtatttgatgggcctttcaatattttcctttaaggaattcattgtactaatataacatagaagctcattgttctaataagtggtccccaatgttggctgcacattagaatcacctggggcattttgaaaaataccaatgcccaggcatcaccccaatctaattaaattaaacctgtggaaggtattttgttaaagatccccaagtgattacaatgtgcagccagagttgaaatccactggtccaattagaaggaggccttagctagcggtcaggtgcccaaggaaaggcatctcaagttttaatgcgcatacagatagcttgggatttgttaaaatgcagattctgatccagtaggtatgggtggaaataaacccatgtttgtgtacagatgtttctcttgtggtatgtggttggtaatcatcctcagtatgtttccatttccggcaaactgggttgagttgatgaccctattcttactcctccctgaaacctttgtctctccctcaggctcccagttctcattaatcactactttctgtgatattctgaagcaattattatctttaactgccttttttcattagctacttctctatctgcttatgtacgtgagttatttcctctactggattacgatcttcaaggtagatccaaatatcatgtcatttttataattctcactgcacctaaagagtgccttacacacaaatgccacttgttgattaattgaaacagggaatagctgatgtgatcatctcaaaaaatatccaaaagacttaaaaatgcaagatatttttctttgttggacagaaaaagaaagtttagataggcaagggggtaggagatattgaggctttcaatttttatttcactcggtacatatttaaattttgaagaattattttgtaatttagtgattttaattatttgttgggaatagggcactattgacattttggactagatcattctttgttgtggctgtcatcctgtgcattgtaatatgtttcacagcatccctggcctcaacccactagatgccagtatcaccctttaccccagtcttgagaaccaaaaatgtctccagtcattgcaaaatgtctcctgggaaactcattcatggttgagaacccttagtttagaaaaatggaagtgtgacacagctgtcttaccgcactaatatagacctgaaaaaaataaaaaattaaaaacatgcacataagagaatgacaagctatgttctgagcaatatgtgtatatataaatattaatataaaaatgttctctgttcctgcgttttggaggccatgtgcttgtagaccatatttatctttgtatttgtcatcttggtcattctctttataaaaatagaggtatattgcatgccaatgctcctcagcttatgaggttacatcccaataagcctgttgtaaatttaaaaaatcataagttagaaatgtcaaaacttgaaaatgcatttaataccctgataaacacatcataaagttgaaaaatcctaagtcaatccatcatgagtcaggaactatttgtatatgaaacatttttaaaatctgaacatagacttaggaattttaatatgtagtggtagtaattccaccaagcaagagaatacatagagcaaaaatcattaagaaacagtgactgagatgattctcattctcaggaaactggtccagcccctttacataaaatattctgttcagtgtgctgtgatccttggactgaatatactgttttagcaagcagagttgttaagctaaagcctgcacatcaacaggtgttcaatgtctgctgaataaatgaagaatgaatgaatattaactgcacctctaaaccctaaaattaaaaagctttaatgtgctcatcacaaaagaccctattttgttgcatttgaaatttcaagcttcaaaaatgaaattacatgcaaaagtatattatcatcaatgagaataaatggcctcaacaaaattacaagatagaaaacaaagtttcatttgtcagttggtttcttctggcaatagaaggctccccttagacttcattagcttcagatatttcagtgacagaaatttaatgttggcaaagcattgctatactttcaggcttggattggaatgccccacatttactttttcctaccattcctggctaaaaacttgaatgtgagaaccagacacaaggctctagtggtagcaagcagaatgtctcctaagctccaaggggaaaaaatgatataagtcagtggttcccaaattaaccatcaaatgctacccattaaaatcactggggaacttttaaaaattaaatgcccaactaacaacaaactgtatgaaaaagaaatttagaaaacaatcctatttttaaaagcagcaaaaaagtaaaatacttaggagtaaatttaaccaaggaagggaaatatctgtttactgaaaactatgaaatgttgatgaaagaaattgaagatggtaaaaataaatgaaaagataaatatgtatggattggaagaattaatattgttaagagatctatactacccaaagcaatctatagattcaatgcaatcctatcaaaattccaaagtcattctttatagcagtagaaaaaaatcataaaattcatatggaaccacaaaagactctgaatagccaaagcaatcttgaccaaaaagagcaatgctggaagcatcacattatcagatttcaaaatatattacaaagctacaatattcaaaatagcatgctactggcattaaaacagatctatcaactactgaaacagaatagtgagcccagaaataaacccacacatctatgatcaattgattttcaacaaagataccaagaacacacaatggggaaagacagtgtcttcaataaatggtgctgagaaaactggaaatccacatgctgaagaatgaaattagatccttatctcatcccttatacaagaatcaactcaaaatagattaaagacttaaacataagccctgaaactataaaactaatgcagaaaatatagggggaaatctacatgatattaatctaggcagaagtttcatggatatgacctcaaaagcacagacaacaaaagcaaaaatagacaaatggcattgcatcagactaaaaaacttctgtacagcagatgaagcaacaaatagagtgaagagacaacctacagattaggagaaaatatttgcaaatcatatattagataaggggttaatattccaaaaggtacaaggaaatcaaactactcaataacaagaaagccaattaccctattaaaatatagggatagcattgggagatacacctaatgctagatgacgagttagtgggtgcagtgcaccagcatggcacatgtatacatatgtaactaacctgcacaaggtgcacatgtaccctaaaacttaaagtataataataattttttttaaaaaaaagcaaaaattaaaaaaaaaaaaaaaatatatatatatatataggcaacaaacttaaatagacatttctcaaaagaagcaagtatcaccctgatttaaaacctggcaaagacacaatgagaaaacaaactacaggccaacatctctgatgaacatagacacaaaaatccttgacaaaatactagcaaactgaatacagcagcacatcaaaaagttaatttgccatgataaactagtgtgttagggtgttctagcatgctattaaaaaatacccaagactgagtaatttataaagaacaaaggcttaatttgttcatggttctgcagcctgtacaagcatggtgccagcacctggccagcttctggggaagcctcatgaaatttttattcatggcagaaggtgaaacaggaacaggcacatcacacaggggaagcaggagtaagagagagtgtgagggaggtgccacacacttaaacaatcaggtctcacaagtactcactcactactgcaaggacagcaccaagccataagggcccacccccatgattcaaacacctcccaccaagacccacctccaacattgggcattatatgtcaacatgagatttgaacagatacaaatattcaaactatatcaagtaggcttccttcttgggattcaaggttggttcaacatacacagatcaataaatctgactcaccacataaacagaattataaacaaaaaccacatgatttcaataggtgtgggaaaagcttttgataaaatccaacctcccttcatgttaaaaaaaaaaaaaaaaaccttaagaaactaggcggccgggcgcggtggctcacacctgtaatcccagcactttgggaggccgaggtgggcggatcacgaggtcaggagatcgagaccatcccggctaaaacggtgaaacccagtctctactaaaaatacaaaaaattagccgggcgtaggggcgggcgcctgtagtcccagctacttgggaggctgaggcaggagaatggcgtgaacccgggaggcggagcttgcagtgagccgagatcccgccactgcactccagcctgggcgacagagcaagactccgtctcaaaaaaaaaaaaaaaaagaaactaggcattgaaggaatatttctcaaaatagtaagagccatctgtgacaaacccacaacaacataataataaatgggcaaaaactggaagcgttccccttgaagacaagaaaaggatgccttttctcacctgttgtattcatgacagtacttgaagtgctagccagagcaatcaggtaaaagaaagaaataaaagacatcaaaatagaaaaagaagaaatcaaactacctctctttactgactatataattctatgcctagaaaaacctaaaggctccaccaaaaaagctcttggaactgataaacaacttcagtaaagtttctggatacaaaatcaatgtgcaaaaatcagtagcatttctatacagcaatagtgttcacattgagagccaaaccaagaatgtaatcccatttacagtagccacaaaagaaataaagtacaactagggatacatctaaccaaggagatgaaagatctcataatgctgcacaagtacagccatttaatcttcaacaaagatgacaaaattagcaatggggaaaggactctctagtcagtaaatggtactgggataaatgtaaatgtcagtaaatggctagtcagtaagtgatactgactagctatatgtagaagaatgaaactggacccctacctttcaccatatacaaaaattaactcaggatggattaattattcaaatgtaatatctcaaactataagaatgtaatattcaaatatatctcaaatgatatacaaactataagatatatattatatctcaagctatatacaaactataagaatgtaatattcaaatgtaatatctcaaactataagaatcctataagaaaacctaggaaacaccattctggacatcagccttggaaaagaatttatgactgagttctcaaaagcaatttcaacaaaaacaaaaactgacaagtttttctgtgtagaagctcttagtttaagaaaaagaaaccagcaacagagtaaacagcctacagaatgggtgaaaatcttcacaaactgtgcttccaaccaagatctaatatctggcgtctgttaggaacttaaacaattgagcaaacaaaaaacaaccccatttaaaaatgggcaagcagcatgaacagacagttctcaaaagaaggcatataaacagctaacaaacatgaaaaaatgtctcacatcactaatcatcagagaaatgcaaatcaaaaccacaataatatgctatatcacaccagtcagaatagctattatcaaaaagtcaaaaacaacagacgctggcaaggctgcagaaaaaaaagtgaacgctcatacacggttgctgggaatgtaagttagttcagccactgtgaaaagcagtttggagatttctcaaagaacttgaaacagagttaccattcaacccagcaatcccactgggtatatatccaaaagaaagtacattgtttcttttggatattgttctacccaaaagacacatacactcacatgttcattacaacactgttcgcaatagcaaagacatggaatcaacctaggtgcccaacaaaggtggattggattaaaaaatgtggtacatgtccaccatgggatactacacagcaataaaaaagaatgaaatcatgtcctttgcagcaacatggatgcagctggaggccattatactaagtgaggtaatacaggaacagaaaaccaaatactgcatgtttttacttataagtgggagctaaacattgggtaaacatggatataaaggtggcaacaatagaaactggggactaacagagtagggaggtagggagcagagagaggactaaaaaactattaggtactatgctcattccctgggtgatgggatcaatcataccccaaacctcagcatcgtgtgatatacccaggtaacaaacctgcacatttgttccctgaatctaaaataaaagttgaaattacaatttttaaaaggatagaaactagtcatcagcgtgttttttaattttccaggtgactctaacattcaataattattttaaataattatttctgtctgtagaccttctgccagctactaagtttcaggaattttgatggtctcattaaagagaacctgacaaccccacttacaagtgcttcagctaagtttcatttataatattttcatattgccaaggatccagtagtgtcttttttacagtgagttacaaattcctgtttttgtgacagtgacaggccaaaattaatgagctgtgatttttaaactgaaaaagtgactgtccaatagaggctaaaaagaaaactaaaattatattttgtcaattttagtgttaagtgtgattttttgctttgtatgttttagatagtttttttattgagataaaacccaaatagcataaaatccacctttttaatctcaaagtggtttttggtatattcacaatgttgtgcaacaatcactactatctaactctagaacattttcattacttcctcatggaaccctgtacccattagtagtcactcccagtttcccattcacctcatttcctggcaaccactaatctacttttctgtctctctgtatgtgactattcttaacatttcatgtaaatcagatactataatatgtggccttttatgtctgacttctatcacatagcaacatattttcaaggtcattcgtgttgtagcatgtatcagtattttattcctttttaagacaatactttattataggattataccacatcttttttatccactcatcagttgatggacctttgagttgtttctacttttctgttattttaaataatgctgttatgagcattcttgcacatgtttttgtgtgatcatatgtgtttgcttctctgggcatatacctaggagcagaattgcagggtcatatggtaactctgtatttaacattttgaggaacccccaaattgctttccccagtagctataccattttacattctgaacagaagtgtgtgagggtttctattacttcacatcctcttgctttctattttaattatttaattatttaatttaattatctaagatgccttttaccctaaccaaccagaaaataaacttgactgaatttagtgctaattgtttttgcatagtcattcagtataattgtctttgacatctcaaaacactgcttatgcagaatacacttttttaaaacagtgaaatcatagcaattctatttcctaagtcagttcttcttcagggtagtaagttataggtctttgaggtcatgttcctgtttccatcttccaaaaggcaacattattaaaatcttgttgctgtatctgccttggcatatccccctctctatccagagaaaagatcactgacagaatagtgtccccacctttctatcttagaggtctcattacgagtcagtatgcttttaaaagaattaatggataaagagctagacatcaagaagaagagagaaaattttaaataagacagaggagtgtatgatcactctttctaagatgattaaatgaaataatttgaaaggcaataaactaactgcaccaagtaaatcttgtgaaagcgaaaggaaagaggagaaggaagatttgagtgctgaaaaccaggataaattgtattcaaccaccagcattaagggaagttatacaatacattttatgaagaaagtgttccatgaaaataaaacaacaaaaagaaagtttggtgaaggtttaaatgataaatgccaatagtagtatatgtgcaattatctactgacactgctatacaaatgagctatctatataggctgtgaccacataacctcacctgccaaaccacagtactataaataaatacttttcccagacactacagagctcagttgacttgagattcatcttatggtaactggaaatgtagactgtgcctttatttgggtcaatcctacaattttctttaatgtaccagcaattcattatttaaagtttactagagtttaatttaaaattataaaaaaggaagaaattggctgggtatggtggctcacgcctgtaatcccagcactttgggaggccaaggcgggaagatcatgaggtcaggagatcgagaccctcctggccaaaatggtgaaacccagtctctactaaaaatacaaaaattacctgggcatggtggcacacgcctgtagtcccagctactcaggaggctgaggcaggagaatcgcttgaacctgggaggcggaggttgcagtgagccaagatctcaccactgcactccaacttggtgacagagcgagactccatataaaaaaaaaaggaagaaattaatagttcaggtgagaacttgtgaatttttattctcaactctaagctagtaagtgcttaaatagaagactttacaacgagctgtaccttcttaattctacagagaatcatgaggaaaatcaaatataaatgtgaatttcttatgttcagtattgtccaaaaagaaaatattttattaaattttttgtcagttgccatcattatttaaagccttcctgccagtagcctatactatttttggaatggagtgtttgcagtttcataaccacttgataacaccataggttaaaaaaaaagtctaccagtctttttcagatggcctctttgacaatgcattatttatagggaagttcagttacttttaacaataaagacaagccaaaagaaattacagatctcttttaccatattttgatatactagcagcatccactcaggacaggacctttattaaaagggggcttaaggtacttttaattggaggaattactgaattcctgaagctcttcaaacaaaatagcacttgggatatgacaagagtactttggagaaggctgcttggtcccaaagcagagattcaagaggaggactccagctagctgggtaaggggttccttcctctcaacctaagtgtttatgtaagcctgctgggggccaggaactgcgtaaaactcagtaagctcagtacttctcagcacagaatccagtcccaaggaagcacccagcaaaaatttaggttgaattttctttaaaataaaataaagaaaaaagtaaaattaaaaaaaaaatacaattcaactactcagcccattccattccgggtagttttggctcagaatgctggaagagttggataggctattagtgagagaactcaaaactccccaaactccacttcattactcttcctttatattttttctgaaaagagtattgccaatatatcaataaagctttttgctatgacttcagagtgcccaggtcactagggaaaagtatcaagtagcatcctgaatccacaaatcctttgagagccagccacacagtatctgcgtgagtgtggtaattctctacccttacgagtgtcatcacagaattgcagcattctcttttcattgtttctcaggaaaacatagacaaaggctctgcttggatttttttaatttaacactaatatgtaataatatagcaacatctcctagttatctagaactcaggctttgatagctgtgactgtctagaatacaaccacagaaaatcacctctgaacagtgagggaaatagctgccacagtatcaccacctactccaagcttgaacctctcaacccgcaaccaacagactgcaagtagttcagtacagctttgaatgcagcccaagacaaactcgtaaaccttcttaaaacattatgaaatttttttgcaacttgttcatcagctatcgttagtgttagtatattttttgtgttgctcaagacaagtctcttcttccagtgtagcccaggaaagccaaaagattggacacctatactttggatgtttcatctagtaccgatatacttataattacatgtttcaactagtactaatgaacttatagttacaggatgaaatttcaaattagcaatgttcatcatttgctcttcctaggtaacaacagttaacaaatcataggttgacaatcacaactgattgtgaggatggaaataataacaatgagcatttatataatgcttactctataccaggcacttttctaagaactttacatagattagctcacttaatctttacaataaccctgtgacataccattattatccccattttacaggtgaggaaactgaagaagttaagtaatttgcccaagattacagattgtatgtgattgaggtaggatttgaactcagcagtctggcaccaaaatcagcactctcagcctctacccagtattatcaaaagtaatttcctggtagcttctttcaattgtcatggcaactctcaagataaagaattattgtttttaataaataatgtcattcccagaaatgaattatgtgtgaatcatactaagctgcagtgagagaatgaatatcaccatcacagtggtgaatctacttagtgtaggggtaaaaggccagtctctcccagcagccctgcacataggtacaccgtaattcactaggataatccctgatcgccatgctgtcataaaaaaacgttaaatgatgtttaacaggtttcattaatgattcagagaatcttataatatgtcttaggaaaaataatttcaggagtaactttcagttagctagacaatacagttctgttgagcatctcataatctatgccagacaaaggaaacattcttgcctttctttgagggaattatagaccaacaattttattaattttcaactttcatcgaggcaagattagcttcatgaacaatgtttctcaaactgaaagtagtgacctgtattagtaaatcaatttatagggttgcaagcagcatcatttataaactgaaatcagaattcattgcaggcagtaattttgagacattttattttacatgtgcgtgtgtatatctatcatataaataagtatgtgagaacattttaaaacatttaaaatatatttatatatctaaagtttaaatgtaaatatatatttatattaataatataattaatatgaattaataacatattaattcatattaacttatattaatttatattaacaatatgtaaacaatatattaattagtaatatattatactaatattagtatgtattaatatattattataatatattatatattaattaatatattatatattgtatattatatattaattaatatattatatattgtatattatatattaataacatactattattaatattttaaatatattttaatatacttaaatttatacttaaaatttacatatacatataaataattttcctgaaagtcactttcaaaaactttgaaagccaccagtgcagtggttaagaatacaaattttgggctgggcatggtggctcacacctgtaatcccaacactttgggaggccgaggtgggtggatcccgaggtcaagagattgagaccatcctggccaacatggtgaaacattgtctctactaaaaatataaaaattagctgggcacggtggcacgcacctgtagtcccagctatgcaggaggctgaggcaggagaatcacttgaacccaggaggtggaggttgcagtgagccgagatcatggcactgcattccagcctggcgacagagcgagactgcatctcaaaaaaaaaaaaagaatacaaattctgaagcacagctgttgagttggaatcatggctgtgccacttaataaccaagtgactttgggccagttattttacttctctatgcctcagtgtcatctattcagtagtgagaataatagtacctaactcattctagttttgagaatgaacactttttatattacatataaaatgtgtaggacagagaccccaaagaagccgtagttgctgtcatattgttattctgttcctgcttaagaaggggacttggaaaaataatgatgttgaatgcagtaacttctttcactcatggaagaattacatattcacatcttctttgctcatcaaacctttgaagatcatgcatgtctcattctgtaacatcgccttaaccaaatataaaggctaaatacaaaggtgtttttaaataactgatacatttaggccagtcacacaaagattttacccaaagcctatgcaggcatagtccaagaagtagacttgttctactgcaatcaccatctcttgtttattatttgtgaaaggaacattatggtttcaccacagttggcctggccaacgtgcttatgcagtcctcagaacatatgaaagtgatttcggctgacaataagtatttcctcactttggcttatgttcaataatagccattctttatccagatcagggtgactgagcatgctgtaaccattcttctcttctaaaactgacccttgtttgactgcatatgcagattgcttagcagaacccatatccaccataacgggccaaaagtcatttgatccaatgtgcttttctttttttttcttttttttttaattccatgaaattttattaagataaattaattataaacattgcaaaacacttttttttttagacagagtctcactatgtcacccaggctggggtgcagtgacacgatctcagctcactgcaacttccgactcccaggttcaagtgattcttgtgcctcagcctctctgagtagctgggattacaggtatgccccaccagacctggctaatttttgtatttttagtagagacggagtttcactatgttggacaggctggcctcgaactcctggcctcaggtaatccacccgcctcagcctcccaaagtgctggaattacaggtgtgagccactgctcccagccccaaacatgattttttgattgaatgcttaatgtctttctattattattatttttttttattatactttgttctggcatgcatgtgcacaacgtgcagatttgttacataggcatacatgtgccatgttggtttgctgcacccattaaaaattaattcaagatggattaaagacttaaatgttaggcctaaaaccataaaaaccctagaagaaaacctaggcaataccattcaggaaataggcatgggcaaagacttcatgactaaaacaccaaaaacaatggcaacaaaagccaaaattggcaaatgggatctaattaaactaaagagcttctgcacagcaaaagaaactaccagcagagtgaacaggcaacctacagaatgggagaaaatttttgcaatccgcccatctgacaaagggctaatatccagaatctacaaagaacttcaataaatttacaagaaaaaaaaaaaaccatcaaaaagtgggcaaaggatataaacagacacttctcaaaagaagacatttatgcagccaacagacacatgaaaaaatgctcatcatcactggtcatcagagaaatgcaaatcaaaaccacaatgagataccatttcacaccagttagaatggcgatcgttaaaaagtcaggaaacaacagatgctggagaggatgtggagaaataggaacgcttttacactgttggtgggagtgtaaattagttcaaccattgtggaagacagtgtggcaattcctcaaggatctagaactagaaataccatatgacccagtgatcccattactgggtatatacccaaaggattataaatcatgctactataaatacacatgcggccgggcgtggtggctcatgcctgtaatcccagcactttgggaggctgaggcaggcagatcacaagttcaggagatcgagaccatcctggctaacatggtgaaaccccatctctactaaaaatacaaaaaattaggcaggcgcagtggcgggcgcctgtagtcccagctactcgggaggctgaggcaggagaatggcatgaacccgggaggcggagcttgcagtgagccgagatagcgccactgcagtccagcctgggcaaaagggcaagactccgtctcaaaaaaaaaaaaaaaaaaaaagacatatgcacacgtacgtttactgcagcactattcacaatagcaaagacttggaaccaacccaaatgtccatcagtgatagactggataaagaaagtgtggcacatatacaccatggaatactatgcagccataaaaaaggatgagttcacgtcctttgcagggacatggatgaagctggaaaccatcattctcagcaaacgatcacaagagcagaaaaccaaacaccacatgtgtgttccaacttaactcattgttcttagtgataattcacttaggggcaaagttaggctctcttgttaattgcaacattcctttcagaggtgctataaatggatgttgaactatactatttttagatttaatctttaaaaatcataagaaagcaagaaatattactagttcagaaatgattttctgttcctggctaatcagagaagacctaagagtctatagtagtcatttgttgtcttcgtagtaaaagtaagattctaataggatttttagacatagtgagaaaggtgttcattttaagattatggtagttcctctcagatttagaaagccttaagatgacactaaggagttggactttaggaatgctgagtgtcttcagccacagcggcacaatggtactagatgtgacaggatgtgattaaggagaaactaaacggccaggcacaatatagttcttcttgcctccaaaagaggagtcacccactttctcacactcactgtgatacattccatttgctaagaaaagtggcttgtgtcattcttgagcactacttttaagttctgatatattaaattcatttactctgtattaatagcattcaaatatttagtaaagttaatatacctctcacactttttccaaagtaacccaccagctgtgtcctgtgcttcaagctatcttataagactgcaatcaaagtgtcagccagggctgtggtctcatctgaaggctggatagggaaagattggttcccatgcttatttacattgttgttggcaggattcagttcctcaaaggttttttttatttttatatatttttttttgagatggagtcttgctccatcaccagactggagtgcagtggcgcaatcttggctcactgcaaactccgcttcccaggttcaagcaattctcctgcctcagcctcccaggtagctgggattacaggtgcatgccaccatgcccagctaatttttctatttttagtagagatgggatttcaccatgttggtcaggctggtctcgatctcgtgacctcatgatccacctacctcagcctcccaaagtgctgggattacaggcatgagccaccgcgcccagccagttcctcaagggtttttatactgagggcctctacttcttgctgagtgttggccagaggccatgcttagttctctgctgtatggttctcaccacacagcaacgtacttcatcaaaaccagcaaaagggtgagtctgctagttaaaaagaagtctcaatcttttgtaacctaatcatagaactgccatccactccatgctgccatattcttctgattagaagcaagttactcaagggaaggaaatacataaggctgtgaatgagagaagacaggaatcattggaggctactttaggggctgtctgccacagcacttaacagcacatacccagccataaaatttaaaaaagccggaaagagagaaggagggtgcagggtaaaataaagaaaagaggaaggtggaagggaagaaaggaagggaaagaaagacatttaaaaagacaagaacaaaacagctctgctgcacaacatctgtatcggagttccatgtgcagacacacacgtcatcacatcagcaccacacccataaatttcctatttcttatttacaatgagaaggtaataaggactttctatgcatctggagttaaaaggaaacaataaatctaagaatactaagtttaagtaatcaaaatgtgtttcagattagttattttttctttttaagtttttttttttgtttcagctgacaaagttttttatttctttctgtttcaagttttgaagttgagtttattattcttgctattatgtaacaggcatattttacagagaatataggaacctgattgacatttgtatttggtgttctattgttgtttcaattcaaatgccaaaattatgtttttgttgtgtacgttattgttcataattatatatgcctcttaattgtaaaagcgaagctgtaaaattgtaaagtactttgtgtctcatctattccaggcattctactaaggaaatcaagaccaaatggcttgggaaggtcaacgttaaatagtgtcagagccagaactagagtacacatctctcaatttctaatctagtgcatttccttttcttatttctgtgcaaacgaacagttagaatgtgaaatagtctcctcagatataccagcattaaaacagttgtggtttaaatatttagttttaataattactaactttgtagaaggacctaaaatagtgtttgttttcagtgcttcaactaatagtaaaaaggaatattttcagtgctttactgtatgagaggtgcttgcctaacgaaatacacatctttttcactgtactcatttgtaacagataatgtgggctcgtacacctcagtgttctgagaggggttggtaaacactgaccacatagagagagctgcccatctgccctcagtaccaaggcacatcccatccatgccctaaaactcttgtaaatttctccattcatacaggaaaatgagtatttcttacaacaatatgaccgtggaatttgattacaaaaacactcctgctatccccaacctgtgctcccagggctaaagacatatttgcaactcaggattttctgaagattcacttgtttgtactattgagggcaacagttgttctcaaacaaggatgcagttcctttcttcttaccctgcttatttttctttttattattattattattatactttaagttctggggtacatgtgcagaacgtgcaggtttgttacataggtatacatgtgccatggtggtttgctgcacccaccaacccgtcatctatattaggtatttctcctaatgttatccctcccccagccccacagccctcaacaggccccagtgtgtaaagttcccctccctgtgtatgtgtgttctcattgttcaactcccacttataagtgagaacatgtggtgtttggttttctgttcttgtgttagtttgctgaggatgatggtttgcagcttcatccatgtccctgcaaagaacatgaactcatccttttttatggctgagtagtattccatggtgcatatatgcaacattttctttaaccagtctatcactgatgggcatttgggttggttccaagtccttgctattgtgaacagtgctgcaataaacatacatgtgcaagtgtctttatagtagaatgatttataatcctttgggtatatacccagtgatgggattgctgggtcaaatggtatttctagttctagatccttgaggaattgccacactgtcttccacaatggttgaactaatttacactcccaccaacagtgtaaaagcgttcctatttctccacatcctctccagcatctgttttttcctgactttttaatgatcgccattctaactggtgtgaaatggtatctcattgtggttttgatttgcatttctctgatgaccggtgatgacgagcattttttcatgtgtctgttggctgcataaatgtcttcttttgagaagtgtctgtttatatcctttgcccactttttgatggggttgttttttttcttgtaaatttattgaagttctttgtagattctggatattagccctttgtcagatgggcagattgcaaaaatattcccccattctgtaggttgcctgttcactctgctggtagtttcttttgctgtgcagaagctctttagtttaattagatcccatttgtcaattttggcttttgttgctattgcttttggtgtcttagtcatgaagtctttgctcatgcctatttcctgaatggtattgcctaggttttcttctagggtttttatggttttgggtcttacgtttaagtctttaatccatcttgagttaatttttgtataagatgaaaggaagggatccagcttcagctttctgcgtatggctagccagttttcccaacaccatttattaaacagggaatcctttccccattgcttgtttttgtcaggtttgtcaaagatcaaatggttgtggatgtgtggtgttatttctgaggcctctgttctgttccattggtctatatatcttatttggtaccagtaccatgctgtctttgttactgtagccttgtagtatgaagtcagagacacaataaaaaaagaaaattttagaccaatatccctgatgaacactgatgcaaaaatcctcaataaaatactggcaaacctaatccagcagcacatcaaaaagcttatccaccccgatcaagtcggcttcatccctggaatgcaaggctggttcaacatacacaaatcaataaacgtaatccatcacagaaacagaaccagtgacaaaaccacatgattatctcaatagatgcagaaaaagccttcgacaaaattcaacagcctttcatgctaaaaactctcaattaactaggtattcatggaatgtatctcaaaataataagagctatttttgacaaacccacagccaatatcatactgaatgggcaaaagctagaagcattccctttgaaaaccggcataagaaaagaatgccctctctcaccattccttttcaacatattattcaaaactctggcgagggcagtcaggcaagagaaagaaataaagggtattcaattaggaaaagaggaaattcaattgtctctgtttgcagatgacatgattgtatatttagaaaaccccatcgtctcagcccaaaatctccttaagctgataagcaacttcagcaaagtctcaggatacgaaatcaaagtgcaaaaatcacaagcattcctatacaccagtaacagacagagagccaaatcacgagcaaactcccattcacaattgctacaaagagaataaaatacctaggaatacaacttacaaaggatgtgaaggacctcttcaaggagaactacaaaccactgctcaaggaaataagagaggacacaaacaaatggaaaaacatcctcatggataggaagaatcaatatcatgaaaatggccatattgcccaaagtaatttatagattcaatgctatccccatcaaactaccattgactttcttcacagaattggaaaaaaactactttagatttcatatggaaccaaaaatgagcctgcatagccaagataatcgtaagcaaaaagaacaaagctgaaggcatcacgctacctgacccagcttatttttctacataggatccccacatccctgcttttgctagaatggaaactagacaaggaccaacttttatcaacttgttcatttctctattcctagaacacagcctggtacaaaatttgcgtttaataatgtttgttgaatgaatttgaatgatggatttgtttagaaggtttataacatcccatgccttatgagtttgttgccagaggaaaaaagaagcctgtttttggttcataacatcaggtatgtaacctggaatttggaatcatgagtttttatgcatttgcttcatattatttatttttaagagatctttcaaagtattgacaaagatactttaagattgagagcctccctgataacccaggaatgagagttttagattaagtttacaatatgattgaaggctaatcatataaggagaaaaaaataagaaaaagaagagaaatttgaaaagaaatctccaaaatggccatggacatcagaacactgagaattcatacacaaaaatgtgttttgcttcatacctgtctgttgcacatctatacatttcatagatgcagaggaattttggctaaattcctaacacatgagaggcattctgcacttacttctcaaattagaattaacacatgagtatgtataagttgtttagagtgggcatctatttaatgagtttactggctgaatcttttaaaagaatgcaaacataagtgccttttatcaaaaatcaatgaaaagataaaaggccctgtagtgcatgctgtggttcccacactacatcccccacatccacctgatgtcatcacaactgtctatggtgtccatttgccactatgcaccctgccgggcagactcaggtgcctgcctcggcaaagaccctcagctcatgtgcaggtacagcctagaagtgcatgggggtgaacatctctgaggcacccttcaaccagtgagtactgggagcggtagataaatatcctagcctctcatctttctacacaacagtggtggtgcatattctacacagcttctcaaaggagcctcagagggattgggccccattagccactgtgataaccagctcagaacacacacatattagttgttctccctttccttcccaccctccccattccctgactgctagatccagaagtcatcttccagatgaactacctatatccaaatcctaatctctagctctggtttcttaaacaggtcctatgaaatgcttgaaataaaaggcaaaatggtttgtgtctagaatcaaaggctgacaatggcaagcaacaggcactaaaactatgacccaggaaaaatgcttttctggaagacatcggcattacctcctagacacggaatacactggcttcatcccagtagtttcttcacacactttagatacgtgtctcattaggatcacatatgactcacctgatttcatgccttgccttttctttttattctgcagattcttctaaggagcctaaattcaccaagtgccgttcacctgagcgagagactttttcatgccactggacagatgaggttcatcatggtacaaagaacctaggacccatacagctgttctataccagaaggtgccaccatcatgcctttctgattttcctctccatggatgtacctactaaagtacactgagtcagatgtactgtgggaatggaagtgatttgttgtgatttatgcaatcaatgaatattcattcactcatttattgaaaaaaatattaatcaagcccatcctatgtgctgagtactattttaggccctggagatatagcagtgattacaaaagacaaaatccctggtctcatggagatttccttccaatgcagggagacaggcaataaaaattgaattaaatgtcagctagtaatataggttattaagaaaaataaagccagaaagcagcatatcagcagtgtgtgggagtttgtgtatgtgcatgagaatgtgtgagagtgtgtcaaagtgtgagtgagagcatgtatggatacacgtgggcatgtgcatgtggatgagagtgtgtgtaaaaggcttgaatgatgctgaaatgcgtggtcctaggaggcctctctattgtggtgtcctagaccagagacataagtgaaacgggacaggccacgtgagtatctgggggaaaggctatgcaggcagaggaaattgcaagtacaaagtccctgaggcagtcttggcatatttgagggatgaaaaaggccagcactgaaggcacaagattgaaagtgaggagagtgatatgggaagggatcagagagttacttagggactgaccatgccaaacctcataggcaagggcaaggctttgaattttactttatttgtggtggaaagctgtaggtgtttttgaaaagatatatgctttaaaagatgtagctttgtttctaaccagataatacactccttctcttaaatatattcagtaaaagactgtagtactttttcatttttaccagtgaccctctaaaataacagaggaagggtgaaacaaagacctctcaatataggtaccatccaagttgtttatttcttccccttcacctggcattattttcatttttgtttactctcactgtgtatatttttcccttttttacattttaggcttaaacacttcattatctcctgttttccacccaacccccagagaaggcctaagccaagatgcagggttagtgaggaccctttatccttggctcaaggtgttcgttagtcagaggatgacattgtctatccaaccgaagagctggaatagggaaggaagatgcagccagcagttaagggtatgagctcagggctaacaaacctgcacttcagtgtagttctgcactttctcaccaaggaatactagggaaattagccagtttgtgtacaactcagcctcctcatttgcagaaaggagataatggacttgcctcatgacttcttgtgaggatcatatgagataacccatgaaaaatacttggcagagtacttgacacataataagtactcactaaatggtagctggtattcttcttatcggtagtatagtgataattttaaaataattatgatatagaaatccagttcctggactataaaatgactataaattgtataagaccatttataccagtaaattgttataattattttaattattggtataagagcattttaatgcagagctgctgcttaatttgcagataaaaaaatacttggagttagcaaccaagcagaccttccccacctttcagtataagagaggtctcttggatgaagtgaagtgaagatgaaatgtttgggcaccaagtatactatatttttccttaaggctgacaccacagagaggttggggccagtaaacagagttgatttctataaatacattcagacatgaagttagtatgtttgatgacacttttgaaatgtgtggaatcattaagttatttgtacaggcacaattagccaaactgtaaagaaaagtagcagaataacctcttaagctgggcccactttatgaaaataattttttgctacctcaatatttaccaaatttgatgagcaaaaagagaaatccaaaggaatgaagccttgataaatatatatcccttgccctcatcaatcagggtcacataactctgtccacaggcatcttatgcacactccagtcatttcagcatctctggttcaaatccaggatctacactaccaaggatgctgctgaaagtgtgactgggtaaagggaaacgttcagacatattcagaaagatgtcttagattttgccctggtagtgtttggaatcccaggagggtaagtacagcttcatgattaagtgccaacccaaacttacaaaattagatatttgtgttttttctataaaatataactattttgaatatcttagccaaactactatgagcccacagcccagtttatccaagaaggataaaactgagggattaggagtatcaggactggactggactgattagtgtacagttatatttgatttctcattgcccacttcacagagaagacaatacaaatgcactttctgactcttatcactgtttcttagaactcagttgccaggcaactcctgaaactatagaaacatgcttctcatccctgacacataaataaaactctgagatgattttatccaaagtcagagtcagtgggcagtgcagttgtttcagtttgctggcctggcctcagtatctaaagcacaacagaacgtgaacatgtcaggctgtcaacaggacagttcaggcacagccctacaggcagttgtgtgttttgcctggctctgctccttgccaggtggctggcagaaaaggcagcctccacatgttagagcagcagattcaaaacagtgtctgccatcctgtgatgacgatagtgccaaattcagcctctgagcttgcaggggactcaggatgaatgcacattacaggcatggtaaaaagaggctctgggaagcatgttcgagctgctctgctctcagctccttgcatgtaaatgctgtgtttttaaaggaagtgggcatgtgaacactcagtccttaaggctgtatcccccacctcttccatacccattcaaccccacttcaaaaattaccctggtcttaagagaaatttcattttctatacaaggttgtgtggaaaatcagtagggagaaagggcattattactttcatttttctttaacaaaagtattaaatttaaagccaaaaacgtgcgctttctgtcatgaaaacagctgcccttaaaaacataaatgatgttttatttttattacttttatctagttggttgtctttagatgaaaaacatttcttctgctctttattcttatttttaatgatagtctctttctatggttctcaccccttccatttcacaagatagtctgggagcaaacctaaagcacttaacttttgggagtaagagcagaggggagcttccatacattgattttggtcatctgtagagacattcaacccagagaaggcaagtgacacagtatctgttttatgagctaatttgggttcttgtctacatttaatagtttaaaatataagttataaatatttatttaaaatgaaattcaacattggttcatgaagaaagaggttggaagtagtgttttgaactagctgtttctgatccatcatgcttaaaataaatgctctgtttgtcctgtggagttcatggatttgggataatctaaacagggttttttaaacagtcctcatggggaacaaggtactgacatgcactgttgagaaattctgtgaatcatgaaagagctaatcttttagaaatccagacctgttaagcactaatctacatctttggaatatcttaatactttgagttttctaacttttatactatcacttatgctaagtacatttgatatcccttctattatgtgaaagcctcattttctgggcaattttcttacaactactctctttaatgcactcttacttaatttgaaagtaaatatcaaattaagcatactatagttcaatgaaccacccacctattcctaatttttttaacatttctcttctgactctacatacacacatacttacacacacacacacaaacacaccttatcttttcttctgccttttgcccatttactttttgcatcagagatgaatctctcattcaagcatatgcaactttttttttttttgagatggagtcttgctttggcacccaggctggagtgcagtggctcgatcttggcttactgcaaactttgcctcctgcgttcaagcaattctcctgcctcagcctacctaccgaatagctgggattacagaagcatgccatcatgcccagctaatttttgtatttttagtacagatggggttttaccatgttagccaggctggtctcaatctcctaacccatgatccgcctgcctcagcctccgaaagtgctgggattacaggcatgaaccaccgtacccagccagcatatgcaacttttaagagtctcaaccaaagcagcaattcactgtctcagaccctggagtctctgccatttaaatcccaatttccttccaacagctgaggagcagctgtctcaaggaccctctgatactacacaagttttctcctagtgccaagcagaccagcctgagaaacagctataagaaggaaataggcgtcttctcccagcttggcatcctttccttccaggccctgccttccctacaacctgcattgtcttcattgtccactgctgcccagcacccatcccacagagggatggtcccaaacctccacagtctggcctgtgagccacaggcgcctctgcctgcacagggccattcctacctcatcttccacaaccacagattacatggttttatgtccctttgacttatatattgtcttctcaattaataggctagtgaataacatggagatgatgaactacctcacccaagtagcaattctaatttaagaaaattttcctgtcattccattgccttttacttccattaccacactcatgcccatacttccttacctcaatccctttgacctctctgtttattcccttccttgccgtattgccatctattaaacttttacccatccttcaagaatgctaaaaacatacctccaccttgaagccttccatgaagagccagagcaatcattccctcttctgaacttttaaggaccctagagagcactactaatgagcacttacccacattgctttgtaatatggttttttactctttccttctgaggcaggaggaattccttagacatctatgaatcccatagtgtctgtcattatgttttagacataaccaattctcattaaatgtcaatagaatgaatataagaggcccaaaaaactactcagatgggaatttgagtcttattttagcctgaaattaggggaccacatcttacttatctttatatctgcacagcgttggtgctggatataatgcatcactctgcctggagcacacatcaacttgtctcctcagtttctttcaccataggctggtgaaacagccaggtctaaaccttcactgttctctgggaatctctagtttgggggtgattctctgtactgttttaatgaacatttttaaaatgtccctaagtctcagaaccttcatctatacaactggcataataaagtacctaccataggaatcgatttatgagcaggcatagcatattcattcaataaacggaagttttaccataggcagaagtaccaaacggcctcgtagcagtcgtcagacactgatgatactgtccactgatgtgatatgtctcggaaatgatgttactaaaatacctcttcacaaaatatttgtcttccaatttattgaatcagactatcaagcaccttacttggacttaagctacaacatgatttttggaacaattaatctttttttaacccttcattttaggaacactcaagaatggactcaagaatggaaagaatgccctgattatgtttctgctggggaaaacagctgttactttaattcatcgtttacctccatctggataccttattgtatcaagctaactagcaatggtggtacagtggatgaaaagtgtttctctgttgatgaaataggtaaatcacaggtttttgtttcatttgacatagttttagactaaataaatggggaagcctgcaaggtccaagtataatcaagtaggaagactttgtaacagtgttctatagatacatggagatctgttttacaggagatgggatcagctggtgaacaagaggaaaagggcagggggaacttaagttgactttaacataaagtagcctggcagtaaatgttgtgaagaagagaataggaaccttgtggagtcttttcctttaggatatctttgaagctgcgttgtgtttttatgttccactgcaaagggtgaacttaatatattcttaggatttcttacttcctaattatttgataggatccttatattcaaattcactgaaatacgttggcctttgacctctaccattgctgtaatcaaagcctagattttctttatcacaaagcataatcattctggaattttacatttacaaaacagccacagttactttaaagacatgtttattagatctcagaacaaatactggagacaatcagctcagtgaactaagtgaaagatccaaacagaggatcctttgcccatcatatggacacaaggtggaaacaaaacaaataaaacaaacaattgtaattagaatagtcatgtttataccttaatagtataaatagcaaaatagaaagaatcaaagaaggactttgagtagctgaaattagtgcctcaaaatctatccacaaaagctcatttgttgcttataggaatttctcgttgcttctcccaaatgtattgttctttttatgtggttttctaggcataagctgactggaagacataggagtatgtggctagaacttacagatagaaacaaataaaatctaataggctgactttaagggagaagattaagagaactgtatcaagcagtaaagataacccaattgctttgcaaagacaatttagtatgtgtcctaacatcactgggtatagctgttgagttgaaactaaatgggatagcagaatgggatagtagcaagaacactgggttaaaacccatgttctagccctgttctctgccaatagccagtcctactcatttacctggctgacatgcctgtcatgtgtcacgcactgttctggtggtggtggttatagaataagtacaatacagtcaaagagggaagtcaggcatgttcacaaataattgcagtgcagcgtgataggtgttagcctggaaatacgtggaatgcagagctgcaaaggtggtggccaaaggcgtgaatgactgacaggcctgagggatgaggaagggctgcacagagatggtgacagtttagttacctctgaactggaattggactctccctatttttaaaaaagtgatgacccacagtggtcaaaagcatgagtgagtattgtcaggtaccacagtggacttgcctttcagtaactactaagttccaacagtaacttagtagttacttagtaattacaacagtaacttagtagtcccaacatgttcagggactcaggagcagttaggaagccctcctagtcagctggagaaatcatcagtagttgtttgtgccccaaaaaggaatttggactttaactgtcacgaggtacctttgaggatgtttaaatagggaaattacttgaggatactaatagttaacagtcacaaaagtcttaccatgtgtcaggtataaaaaccatcttttgcaatcacactttacagataatgaaaccgaggcacagagcagttaaaggactagttcaagtcaaacagctagtagatagagctgggatttgaacctccagcctccatgctcttactcttgaggctttgcagtaccacttgtctctttattaatgctcagagaaattaatcttgttgcaatgtgaaacgtagattggagtgggacggactagaggtagaagaggttaaaagactgagatgatcaaggtaaaagattatgacaggtagctacaactagcacaatagttgtggggcaaggtgctgagagtgaaagagaacaaagaactaatgtaaccctggtagatcttgagaaagttgtcaatcattataagcctcagcttcctcataaaatatgtatgtatggtactacctcacagggctattctttggatttgaagtactatattagttagacatttgtcattcattcaattcattcagcaaatatttattatgctcttctctcaggccagtcaatgttctccatgctggggatagaaactgtcttccctggtgggatttaatcccaacgaggatggaaagcgacaatgctatggagaaatataggaaaggagaataggagtgttggagaggttgcagtgttgagttttcaggattggcatccctgaggcagtggcatttgaataaagaaggattggagaggataattatgtgtgtgtctcagggaagggcatttcagcaagggggcacgccagaagaaagatctcaaagtaggagcatgcttttcctcactcaatgaacagcaggccggcggtggagtgggcacagagtgagcgaggagactggtatgagaccaaatcgcacagacaagacagtcaaatctacccaaccattgccaaagactttggctttcacttggagtgaggtaggcagcctttggagggttttagatgatgagcgatgtgatctaacgtaagtgttaggataatcactgtgtcagttcgcttgaggattgcatggagaatagactggagggggacaaagaccaaaggggtacagtggggagacaaatgaagcaagaagaatgaaaaaggataatggccaggaccaggttattagtggtgcaggcggtgggacatggttggattctgttatatcttgaaagtacagctgacggaatgtggattagtgaggaaaagatgagccaaggacaagttcattgtttttatcctgagcaactagaggaattgagtcctcgttaacagagatggaaaagaggaaaggagagcaggttttggagaggaagagcaagggtttgtttggggatatattaagtttcagatattttttaaatatctcacaggagttgtcaatatagcatgtagatttatgtatagagataaaggagaggtcattattatgcctgtaatggtatctcacaggaggtcattgttatgcctgtaatggtggtaccaaatcttttccaaaaggaccttgtctcatatcctctatttttcaaatgcagcataagtaatgagttatagaaaatcttccattaaaaacaattttatagtttggtcactttaaacggttaagctttgattatcaggattcctgaatctccaacaaatccagaagggtgaggaattattgccattatatcggcatatgtagtttggccattttgcatatccttccaatttaattttcaaaatgtagtcatgattcatcaaattttgactctccctgtttttaaaaaggtggtgtcgaccccacagagggcaacagcatgctcctccaccataaggcctgttttcactgtgggtgcacacaagagcttccctctttggccaacagatttgacagccagtaagagctcctcactgtgtatatctgtaaagttatctccagtcaacgctagggatgcacactctgcaacactctaggtggccttctgtatatatggcagaaaaagaaagtaaattttactctgtatctgcaagtgattttcaaaaccctcagtaatgagatccaactagcaaaaatttaccaggaactctctagaatataaatttagacatagttcctagctttggaatccatatttttcttcatcagcctctgagaaattgtggtctttgaggtcctactaagcagaatgcaacaaattttcgtggaactgtagagtatatcaatagaacctgaggaaaacaatgtttcaagttgttcatgtgacagtcaaaaagacagaaaacactgaattgtcaccatttgtgagactagcataatgctttcttccttcttatgtcagaagaaaatatcacatgtggctaggaagatcacaaagctagggagcattagcagagtgtgcaggaagattgtatgagaagattgaagaagagtaaaaaaggataatggctaggaccaggttatagtggtgcaggcggtgagatatggttggattctgttatatcttgaaagtacagctgacggaatctgacggaatatggattagtgaggcaaagatgagtcagggaacaacacagaaatgaggtaaacagggtctctgcccccaggccatacatagttgcaagaaaaaaggtttctctacccctagttccgaagcagccccatgtctaaattctgtaagtctttctgactctctgttttttcagtttcaagtgaaaataaattcctttgccaaaatcctgatgcatttatgatatcagagcaaaaagaaatatacaacatggcagatcttgtaaatagtgatcagatgttttactccaaaaggaatttttgtaagggcttatttagaagttaaaaacaagtcatccttgagttaaaaaaaaaagttactctcttataaagtgaaagttataataagaaaaatattggaagaaataagagcatgaatgatcaaaaatgtagaaagtaatttggtcttctgagaagaatgccttccattaatattaaattgtgtctgtctgtgtactaatgctctgttgaattgcacagtgcaaccagatccacccattgccctcaactggactttactgaacgtcagtttaactgggattcatgcagatatccaagtgagatgggaagcaccacgcaatgcagatattcagaaaggatggatggttctggagtatgaacttcaatacaaagaagtaaatgaaactaaatggaaaatggtaagatgttgctacaccttacactttgacttttctttctatttcaacaaactctctctcatttatcattagactttcctttgacctaataccacatgttcatgctgtatgctccataatttcttaattgagaaaacattatttaaccggtaaaatattgtcttgaaattctgtaagacaggagatgcttatgtatatatggaggcctgtggaaggaaaggaaaactatttctccattcattcttgctgtccagtttaactttagagcaaaattatagactggccacttagctgtctttggggatgtggataaaaatgggaaagtttgtgatccagtcaacagtgactatggccaaatattttcccatgatttcagttgctgctactcaaaggactcccactaaaacaaattcatacgtgtctataggaaaacagagggagggaatttgtctcttagaggtttcagaaggatgttttgttacatacctcagagaagaatcaagctgagattcttatgtaggcaattagagagcatggtaccagttgacctctgaatccctctcttccttaccaagcatatggaactcagcattttgataaatttcacatggcacataacaagaggaaaaacaggagtatcatgctgctcccaatataactaattctaaatctgtctaaccacagccacagccacagccacagccaagccaagcagtttctggccactcatcaggtgatgcccagcagcctggcacagatcactcccagaattttgagacaccaggacattcagtgagccactgaaaaagatgccaattttgtcattagaggaaagttaagtttggaggaaatttgagtagttacaatactgggctttgaggctctattttctgaatcattttaatttagatatctgttctgtaacttggtacaaataaaatgcctgattggatgctaagtcaaacaagactgtctaaatccaagctacaatcaaacattatttaacaacaggtactgaaataactactatgcagaaggcactgtgctaaatgcctgaggtggcggttctcaaagtgggagccacagacccttgagggtccctgagaccctttcagggagttcagtactattttcacaatacactaaaatattattttattaactatgttgaaatttaacttaatggcacaaaagcaatgctggaaacactgctggcaccttagcatgaagcaaggcagtaggatcaaattttactaatagtcatgcactcccaatgaagaaggaagaaaaagccagtttcacgtttgaagttcttgatgaagctgtaaaaattgttaattttactaaacctcgacctttgagtacatagcttattaatattctgtgtgacatatgggaattacacattaagcatgtctgctgcgtactgaggtattgtatttgtcttgaagaaaagcgcttaaatgactgagttgccagctgaactagttgcttttattgcttggagcaccatttttacttggaagagccattgataaactggcagatggttattcatatttgaattggcaaacatttgtcaaaaaagaatgaggcaagcttgtcgcttcaagaaaaacaactgacagtattttttgcaatggaaaaaatttgacttttcaaagcaattcattttgcctttttcgaaaatttgtgtctccaaccgtgagcttgatagtgttttaatatttgaagacttttcttgaagagattgatggtgatattaatgaaagtgactttttaattatattgtgtaataaaatgtatgaacatttagaaaaatctacaactcagttaaccaatattttccaaattactaatacatgatgtaatcaaatcatgcatggggaaatgatccattcaaagtactagatagaatcgtgaatttttttaatgatcaaaaatttttttgtatatttattgtgtacaacatatttttttgaaatatggatacattgtagaatggttctatcacactaagtaacatatgcattaccacacatacctttttttgtgtgttgagaacacttaaaatctactcagagattttcaaaatacaatacataagcattaactatagtcaccattttgcacaatagatttcttaaactcattcctactaactgaaaattttaattctttcatcaatatctccttaactctgcaccctgcccacaacccctgataaccaccattcaactctctgcttctgagttcaacttttttagattctgcatataagtgagattatgtggtatttgtttttctgtctctggatcatttttcttaatataatatcctccaggttcatccacattgtcacaagtgacaggatatccttctttttttaaggctgatagcattccattgtatatacctaccacattttctttatccacttatccattaatggaacataggtcgattctatttcttggctgttataagtaatgaacatgggagcccagatattctggctcaacatactgatttcattttccttggatatatacttagtagtggaataatataatggatcacatggtagttctatttttaatcttttgaggaagcttcatattattttccatagagggtatactaatttacactcccaccaatagtgtgcaagggttcccttttgtccacattctcaccaacacttgttatctcttctttttttgaaaatagccatcctaacatctttgtgcactctatgccttctgtgagctgatagctcattgtggtttaaatttacatttccctgatgattaaagatgtcaagcatttttcatatacctgttggccatttctatatcttctttttaaaaatttatattcaggtcctttgcccattttttaattgggttattttcttgttattgaattgttttagttccttatatatttcagatagtaacttcttatcagatgtatgcaaatattgtctcccattccatagagtgtctttttactctgttgattgtttccttggcagtgcagaagctttttagtttcatgtaatcccgtttatctatttccacttttgttgcctgttcccaatggagtcatatccaaaaaatcattgcccaaaccaatgtcatggagctttttcctatattttcttccagtagttgtacagtttcaggttttacatttaagtctttaatcgattttgagtttatttttgtatatgaggtaaaataagggtataatttcattcttctgcatatggatgtccaattttcccaacaacatttaaagacagagtcctttccttactgtgtattcttagcacctttgtgataaatcaatttactgtaaatgtgtggatttatttccgaacactttattcttttacattggtttatgtcatttttatgccagtaccatgctgttttgatgactatagctttgtattatgttttgaggttggtagagtgatgatttcatccttgttcttcttgttcaagattgctttggctattcatagtctattgcagttgcatacaaattttagaattgctttttctatttctgtgaaaaatgacattggaattttgataaggattgcattgaatctgtagattgctttaggtagcagggacattcgaacaatattaattcttctaatccatgaacatgggctatctgttcatttatttgtgttgtcttcatgttttacagttttcagtgttcagatctttcacctttttgtttaaatttatttctaggtcttttattttatttttatttttatagatattgtgaaagggatttctttatttctttctcagattgttccttattagtgtatagaaatgttactgatttttgtatgttgactttgtatcctgcagctttactgaatttgtttatctgttctagcaattttttgttgaagtctttagggttttctatatataaaatcatgtcatctgtaagcaaggacaatttaactttttccttctcaattttggatgccttttatttctctcttttgcttaattgctctgactaggattttgaatcgagtagaatagagtagaggagttacattgaataaaaatggcaagagtaggcatctttgtcttgttcctcatcttagaagaaaagctttccacatttcactgtttattatgatgtgagtttgttatatatggcctttattgtgttgaaatacattccttctatatctaattgttaagggtttttatcatgaaaggatattgaattttgacaagtgcttcttctgtatctgttgagatggttccatggttttcgtctcggttctgttaaagtgatgtattatgtttatgtatttgtgtgtgatgaaccatccttgcatccctggaataaatcctacttgatcatggagaatgttccttttagtgtgcttttgagttagtttcctagtattttgtttaagatttttacatctgtatttatcagagatattagcccataattttcttttcttgtagtgtcctttcatggtttgggtataagggtaatgctagcatcaagaaatagtttggtagtatccccttttcttccactttttggaaaagtttgagaaggattggtgttccggtgaagcttccagtgaaactgtcaggtcctggacttctctttgatgacagactttttattactgattcaatctccttacttattattggtttattagattttctatttcttcaagaaagtcttagtaggttgttgtgtgtaggaatttattcatttctcatgcatataatttttcagaatggtctcttatgaacatttgtatttctatggtattggttgtaatgtctcctccttcatttctgattttgtttttaatttgggctttctctttttttattatttagtctagctaaagattggttgattttgtttatcttttcaaaaaaacttgtttcattaatcttttctactgttttaatgtgctaactgaaaagcacattaaaaggatcattctccatgatcaagtaggatttatcccagggatgcaaggatggttcatcacacgcaaatacataaacataatacatcacattactagaaccaaaaacaaaattatggaaccatctcaatattttctattctctatttcatttatttctgttctgatctttattatttccttccttctatgaactttatgcttagtttattctttttctggtttcttcaggtaaaatgttaggttattcatttgagatctttgttttctgatggaggcatttattgccatgaacttccattgctcttagaacgacttttactgcattccttaaggtttgctatgttgtttccatttttgtctcaagatatttttgattttattttttactttttaactatttttttaggttcagagatacatgtgcacgtttgttatataggtaaattgcatgtcacaggggtttaccatacagattatttcatcaccaggtaataagcatagtacccagaaggtagttttttgatcttcaccttccttccacccactaccctccagtaggccccaatatctgtggtttcagtcttcgtgtccatgtgttctcaatgtttagctcctactaataagtgagaatatgtggtatttgttttcctgttcatgcattagtgtgcttagcataatggcctccagctccatccatgtgactgcagaggacatgatcttgttcctttttacgcctgagcagtattccatggtgtacatataccacatttcctttatccagtgtaccattttctttattccatgtctttgctattgtgaatagtgctatgatgaacacacgcatgcatgtgtctttatggtaaaatggtttatattccttcaggtatatacccaataacgggactgctgggtcaaatgacaattctcttttaagttctttgagaagttgctaaactgcttgccacaatggctgaactaatttgaattattaccagcaggatataagtgttcccttttctttgcaacctcaccagcatctgttattttttgactttttgataatagcctttctgactgctgtgatgtagtatctcattatggttttgatatgcctttctctctaattattagtaatgttgagcattttttcttacacttgttggctcatgtttgtgttcttttgaaaagtgtctgtttatgccttttgtccattttttaatgggactgtttgtttttggcttgttgatttaaagttccttatagattctggatattagacatttgtcagatgtatagtttgcaaatattttcagccattctgtagattatctgttttttcagttgtttcttttgctgtgcagaagctctttggtttaattagatcccatttgtcaatttttgtttttgttgcaattgtttttggcatctttgtcatgaaacctttgctaaggcctatgtccagaatggtatttcctaggttttcttctagggtttttatagtttggggttttgcatttaaacctttaatccatcttgagttgatagtcgtacatgttgaaaggaaggggtccagtttcaatcttctgcatataactagccagttacccagcaccatttattaaacagtgttttcctcatttcctgtttttgtcaactttgtcaaatattagttggttgcaggtatgaggctttattttggggttctctgttctgttccattgatctatgtgtcttcttttttaaccagtaccatactgttttgattcctgtagccttgtagtataatttgaagtcaggtaatgtgatgcccctgggtttattctttttagttaggattgctttgactatttgggctgttttttgcttccatatgaattttacaattgttttttctaaatctgtgaaaaattacattgataatttgataggcattgcattgaatgtgtagattggcttgggcagtatggtcatcttaacgatattgattcttctaatccataagcatggaatgtttttccatttgcgttatctgtcattttctttcatcagtgttttatagttctacttataaagatatttcacctcctttgttaaatgtattcctaggtttctgtgtgtgtgtgtggctataataggctatgttaacctgataacaatttaactttcttgcataaaaaactctacacttttactccacataccgcccccccaaacacattttaaatttttgatgtcacacttacatctttttatattgcatatttcttaacaaattattgtacctagtattatttttaataattttatcttttaaccttcattctaaaataaaagtgatttgcatattaccatgaaaatattagacaggtaatgtgatgcccctgggtttattcattttagttaggattgctttgccaattgggctgttttttgcttccatatgaattttacaattgttttttctaattctctgaaaaattacattgataatttgataggtattgcactgaatgtgtagattggcttgggcagtatggtcatcttaacaatattgattcttctaatccataagcatggaatgtttttccatttgcgttatctgtcattttctttcatcagtgttttatagttctacttataaagatatttcacctcctttgttaaatgtattcctaggtttctgtgtgtgtgtgtggctataataggctattttaacctgataacaatttaagtttcttgcataaaaaactctacacttttactccacatactccacacacacacacgttttaaattttcgatgtcacacttacatctttttatattgcatatttcttaacaaattattgtacctagtattatttttaataattttgtcttttaaccttcattctaaaaagtgatttgcatattaccatgaaaatattagactactttaaattggactgtgtacttacttttactagtgagttttatactttcatatgtttttatgttactcattagcctccttttctttcagctaaagacctccctttagcagttcttgtaagataggtctgttggtgaggaatggttaatttaaatataacaaagtacaaaaagttcatcagtagagtttcaggtttcatttttccactaacctgtaagaatttatcatttgagttttagtctattgttaaacagaaatgttcacaattatgtgaaaagtttattaaaatattcctcattttcctcattatttatctgtgtgaggccaggttttattcatttacgaaaatagcacattctaatagatttaattcagaagcagttataaaaatacagtcatcttcctttaagtctgacattaaataaatttgcaaaaatgtaaaacagtatcactcttctcactctcttttttgttgtttgggaaagtacaataatttttatgaaaatatattatttaacaaaatcaatttattattttcagtttaaaaataaggattttaaaattttttcatttcaatttctaatactgtaaatagtgataggtataacccaactaaaccaaactctttaagattctcaaatttttaagagtgtaaaggagtcctgaaataaaaaagttaaacaacctagaaaaaaacaaagatataaatcagcatgttagcattcatcaattcagttaccatcatttcatccctaaaagccatggcatatagttacgtctcactgagccaccactttgaaactcccaccctgtgccaggtacttgtgagcatgtaactttgttaatcaactgttcagggctatatcccaacatggctttgttgcacttttcgtggcacctctgctaaatctcgttaggtagaccaaaggggtcagttaactttttctttataccttttattcatgatatttataagtttggtaatttacaaaggtcttggacaaagaccaggggcttatatataataatttatttatctcttgaagaaacaaacaatataattggttatgaagcacaggcgtcataagcagaaaacaggtttataggtaaagggggaagacctagtgtgtgtcgcttgcatcaggaattcatgttaccatttggcaatatgaatttgcttagcagtgtgcttttttttctcccccccacaggatcttgctctgtccccaggctagagtacagtggcccaatctcggctcactgcaacctccacctccagagttcaagtgattctcgtgcctcagactcctgagtagctaggattacaggcgcaagccaccacacccagctaatacagctaatttttgtatttttagtagagacagggtttcatcatgttggccagactggtctcgaactcctgacctcaggtcatctgccaacctcggcctcccaaagtgctgggattataggcatgagccactgtgcctggctgccctttttagtaaatacattttgcatgaccatgtggttgtttacagctatttatctagtaaaccaataacttacagctttttaaaggcttaatgaatagcatggaattattcatgatatctgtgccatatcttgaggacccactgtatacctgatattgcactggactttggaaatgaaaaataatgagtgatcttggggaatttacaatgtaacatagaaaggtgtgtatcactaaatttgcacaatgaaacataattaataatagaagaagtatattatctggcagaatagagtggggaaaagtaccagcaaagacttagaataccagctctcctcaatacttgcacttagacttggatgagaaacagttccccgcacaggcagatgacagggttaggtatgataggagccacgtaagtaggagccactcgaaatctgagtttggtgtggctggtgtggagggttgagggaatatgaagagaggaccacaacttgaatcactgagggcccttttttgatcctattagtgaaatctttaaagaaattgtattggtgacaataacagagaaataagggctttgaggatgaaaacataggctttaaaaaaaaaacttaagaaaaaaataataaagtaagttcagtattcagtgtcctgccttaaagaaagcattttaggcatgcaaatatcccatatattcagaggcttctataaaaaatacaaacaaaccctgtcatatacacatgaggcaaaaaaagatactttgtgagtagaaactattgaggtaaaagaaaaacttgttttagaagctgaaggcccagctgctgacttaataaaacaaattatgagaattttgtttatgcgaaaatccatgctgttgaaaacgcgagtgtttaaagttttctataaacaggaacaaggtgttctaccaaaaaaaagtataaaagcacattgaataactgctttgagtatttgacttggaggaaactaccatcactagttgagtatacctctttgatagcaatatgtgttaaaagtctaacagtctcactctacccctccccgagaaggtaaaggaatatcctgaccttaagggttgtgagacctagatgtttcttaccaaagaactccggtgacttttctttgcagattttaaatagcaaactattttatggtggctttaagccttccagagcaagcagattaggtatgtagttccttttaataaaagtatttggaagttcaataaaggcaattatgatttttctaggaccttttccaattctgtgattatgtgaatgactacccggaatttccatcaaacactgatatacaacttgctatggctacaatttattttggtgtgaaaacatgtttgcttttctgttcttatgtctcccttcatacaaaagtataatatcccagatatgtaggcatatagttctgccattcagagtaattctaatatactttaatcttattaactatctggaagactaatgcacagttatagctgcatttctttaagcaagtctatcatatctttgggtttatgccaaactaaatttgtgaactattatccatttacaaaatgattatttacatcaatcttcctttaaataacaaatgctcacaatgcattttaaaatattacctactttataaaaatccattctgaataaaaatgggagaatacctgtagtgttcattgcattgagttgttgactctttggccaatatgcgtttatattttgtcttgaaagatggaccctatattgacaacatcagttccagtgtactcattgaaagtggataaggaatatgaagtgcgtgtgagatccaaacaacgaaactctggaaattatggcgagttcagtgaggtgctctatgtaacacttcctcagatgagccaatttacatgtgaagaaggtaaaagaaataaaagattaaaatagtagctaacctggcttttgtcaatataacagttgattcacccctgcactggtagtgtgttgtccaaatcaaaatatattaacatcagatatcaggatgagagaccttgagctcactatctgtaacagatattgttcattgcaaaagcagaaggaagatttagtttccaaatttttcattcaggagaagtccggggggcaggtggaagtttagagacaggaatttggtggcaatctccggatggtagaattcagatgattcttttctttatatatttttatatttctgaaattttctatagtaagtttgttttgaatttataatcaggaaaaaaagctgtactgatggttagggaagaaagtatgtatctatatggatggatagatatgtgacatctaagaggaaacccaatattgagtcagcataggtagtcaacagcaggtgcatacggttttagaaagcggaggtgtggcttttacctagaggaatgcctaataagtagtgtggcagtcatacttaaaggagacgtggaacatttgaaaaccctatgtaggagaatcacaacaatgattaaagtttttaaaaatgggacctatgaatttagaataaaagaattaaaacttttagatacagaaataaagaaaactgattaatgatgagcagaaagtatagagtattattattctcaaatgggaaatggctctattccatcttcattgaaaacagaagtttacagggctatatgtttgttaatgaaacaaccacaagctacatagaaaataaatttatatttctgtatttactatacaggtagaatctcatgatactaaatagcattaggatgaaaatttctatagcaccattttctctatactctagttaactgaattcttgtttccaaactatttgatattatgcaattctggccttaaaagtacaatagctatacacccttaagcttagtgtagtggcatttaattcacttaacatatattttttaaactgccttttccttctgttactaacaaaaaagaagctctaactttatgttattttcctgaatatgtcattgatatgaaattatagacactacaagacaaaaaatgattttttctcccccaccaattctttaaaatgcttataatatctccctaggggattttaataactttttaaataagaaaagactatttcagcataaagacctacattttaaatggcaatgttaaggtaaatttcatctgtcatttttataaaaaagtggttagcctctgcctctgtggtaagaatactgggtaccaactgcaaagtagctggcaggtactcaatcttaaggaatgaaatagaagttttacaaacaggttcccccaagtctcatacaaagtatactaaaacctgaagatgggagcctcagtagtgatctttctgtcaattttatgtatataatatacatgagatatatttattatattttaataatttaatttattgatataaatacgtatatttatagctgtaaaatatatgttatttgtgtctaagaagtttctgtcatgatttatcaataaaaactctgccttcatctttttgataaatcttcaatctggaaactaagaaaatcaccacacttaaaaaaaaatagaaaagaaaccgagtgggcattatttaggtagtgtgttaataagcaacacttttttactgaagctgaaacctttatgatactccctggacacatagtatgcttaaagcagattgtttgttttcataaaacacacattgattttgaactatatgctgtttctttattttgaagtttttttttaatgtgaggagatttgaaaagtggacagagatgttcataaaacagaaaaaaactaagtcgttgcattctgtttcagtggttatcaagagaaatcactgactttattagatgaatacaaattatgaattttttgtgaaaagggaaagggaaatgtaaactgtgcttcaactattcgtaattctgaaagcgaaatattcttgtgtgtttcagatttctactttccatggctcttaattattatctttggaatatttgggctaacagtgatgctatttgtattcttattttctaaacagcaaaggtaggtgtggagtagtattctttggtattttgtaccagttgtttagatttccatatgtgtttctatttgttatttgatattttctttgtcaaattatgagtggaaattttagttaacctagtacacttttatctccagttatatatttaccattcatataaaactcaatttgttgtatttatcttagacaatttagaggtttagattctatctggagacttgtacaggacattaagaggcttaggctggtgactatgcataccttgtgatatgtacctctttatccaagagctagctctttccctcaagtcctcaacaagttgacccattcattccaggacttcaaagtatcactgagcctttggctgagtctgatacagtccttatatacagacaatttttttttttccttgagacggagtcttactctgttgcccaggctggagtgcaatggcgcaatcttggctcactgcaaccgccgccccccaggttcaagcaattctcctgcctcagcctccagagtagctgggattacaggcatgcgccaccaagcccagctaattttgtatttttagatacagtttcaccatgttggtcagactggtctcgaactcctgacctcaggtgatctgcccacctcagcctcccaaagcgctgggattacaggcgtgagctaccgcgcctggccccatttaaggtatttttaaagtcccaatggttaatcttgttgcttctcctagaattaaggtgactaacactcccaggttgcctagaactctcctggtttttagcaatgcaagtccggtgtgccaggaaatccctcagttccaggtaaccaagacagttgatccccttacctagaattgaaaatacgttctccagctgaagccaagaggcatctataaatcaaaatgagatctatgttaatatattttaaaagattttactttgttttgtaaggtagtatagcacttgtaaacttcaaaacagaattttgttaggaagaagaattattgggacgctagatttctatagtgtcaagcatgctaaaagtctaactgaatgcagaaagggttattttcagtagagcttcatgtccaattttataatataaaccaattggaaagtaaaattcattctgaattccattttgcacctaactttctggcaacattcctgttttccaaaaaagcagctatcataaatcacaacacaattttctattgtttcaggaaaataaataaatatatttttagaattttaatttgtgtatttaagtaatgccaacaacaaaaaagccaaattattctgttgattaatttcagtttattaatctatatatttggtgggaaaatttatacataacttcagtagataaactcacgaggtatgtaaagtaattagctcttagtattagctgtgaatttctagccattgtgaaggccaagtcaatttgttatgttgtttagttatattagttaacaatattaggaagaaaaaattatcctctcaaaaagtaggatttccaagaaaacatattacttctaatacagtgctttttataaataatgaaatgcttaactataatgtttagtcaaaatcaccaaattctacaattgatttgaaatctttattgttctcccaaatttcctgcactaaattgaattttctgtaggaaagaattaactttattttttatttgcccattaaaaacgcttatcattgtctaaatttgcatgttctactgaaagtgggaaatagtagcaaatatttgtcagcaagtatggacagaacatgtagttccaacaattaaattgatactgcaaagaacgagatttttcctagaactgtagggctgtaaagtggcgtcaggtcctacatgcctttgaaattttctgagtccacaattcattatccaacccacttcaccctgctttaatccagttaattgagtcaactctagcaaaatttataattttatttgtatctgatacaaaaccacaaacatagtttcaagtcaggctattattatactggttcctaccacacaaccctcccagcctttgagctgttaccaattgaggaaagaaataactgaatcagcctaaaatagaatttccaaaccagtagcgaaattcagcctacagattcatattttgttattttattttaattagttttgatttcagagtgaagattttcctacaaagtgtttgtaaaatagagaattttcacacaaaaatccagatttggggattatcttttaaaaaatgaaagatgtagtgaaactaaacaaggcagcatatgctgcagcagacaaccagctatcctatttgggattggctcacattctttaatttgccaccatcctcattcctcctaatgactttgcaactggcttgctttattcctctgcatgacctgcttgggcctcttagatttatgctctgccactgtggcataaggtcactacaaccactagaaaaccactagcgcatgcctgaatgcatcatcctatttaaaaaggaaaagcacacgtcacaaagtcaaacatcagccatttggaaacctttgcttcctgtaattagaattatgttccatctttttatgtttttgggaatttgaaataccaatttcgagatgcagaatcaaaaaaaaaaaaacaaaacagcgaaacagcagcatgacacaaagaacctgggttttgatttggagtcaggttctctgggtttgagccccaactgtgccaactatgaatgcatgatttgaacatgttgcttaattttccaagtttttgcacagatatatcatctgcctccctgggagtcataaggattaagtgaaatgtttagtgcaggggtcacaaacttatttcatagagttagagtacatttttaggcttttcaagccatacagtctctatcacagctactcaactctgccactgtagcacgaaagtggccataaacaaaatggaaatgaatgaagatgcttgtgttctcataaaattttatctacacaaacatgtgacaggccagatttggcccacagaccttaatttagtgacccatagtttagtgcaaagtatatcccacagtgtctgatttatcagaagcactaaaaaatgatagtagttattattaataatttgtattacttatttctatatctgtaattcatcagtaacaatatgctttaacatttgccccactgagtagtagaggctacttaatgcaatttataaaatggatttttgcttattacttggattaggtaaaatagcaagtggaaatactgagaaaatgtactccttatggaatggactggactgaccattcacactgagtggaatagtaactgatatccaaaaatctggttaccacctcttcatgacagtgtcatctctgaatagtcaggagttttttaaaaaattaaatgaattgtttggaataatctctgagcctttttccagtgctataatttgattttaaaaaataaactccaggccagatacaatggcttatagcatataaatccagcactttgggaggatggggcgggagtattgccctgaggccaggagttccagacagctcgggcaatgactagagcaagactccattacaaaaaatgaaacaacaaaaattagcacaccctgtagtcctagctacttaggaggctgaggcaagaatatcgcttggcccaggagtttgaggctgcagtgaattatgattgcaccactggactccagtgtgggcaatgaagtaagaccctgtctcaaaaagttttaaaaaaaattaaaaacaccataaattccaattacactattaattgtacaaaatagatacatgatttattcatttttatgaccaaaaaataatttaaagatttggaacaaaaaatgtaagtgcatcctagaattgtatatataaacccatactgattagttagagatagttaaaatttaatctgtcccatctgaaatgaaccctgtagtaaaaccctggttaataagatcatcttagataatttcataattaatatgaactatatggctaacctacccaagtctaccctttttcaagggtgtaagtaatcttggctccatgtggattgactcttttttctttctttcctgtacaaattactgatgagatgtacactagaattgccttatagctgaaatggaaatcagctttagatgaaattaaatttctttctttcaaatactaaatctggctgaaaataaaaagcattaagaaaaaaacaattgtgggaaaaccacattttcttttaatagacttcagatgaggctttttgggttttttagttgttcttttttttccttctacagtttttctttctcatttactgtctaatattttcttctgtttctcacactccaattatataaagtaccagaatatttggaaaaagtaatagtattgccaatattttatttctatcttttgctataattgagaatatgtagcttttaagatgtcaaaaccaaaattttatatgttttcaaggattaaaatgctgattctgcccccagttccagttccaaagattaaaggaatcgatccagatctcctcaaggtaactaataattttatctaaattgtagctagtactaattaacacctgaagactcctgtcatatgttgaaggttttctgtaagctatatatatcacattcaattttcttgtgtctcttctcctggagaaaatttttttaaatattctatttcttaaaaataagaaaacgtcatatgtatttaaaaagttacacactaatttatgtttttttatatgttttgttactgttgttcttattgtaaccataattaatctctgaacattatttgctaattcatttaattattatgagtttcttttcatagatcttcattttctttctattttctaggaaggaaaattagaggaggtgaacacaatcttagccattcatgatagctataaacccgaattccacagtgatgactcttgggttgaatttattgagctagatattgatgagccagatgaaaagactgaggaatcagacacagacagacttctaagcagtgaccatgagaaatcacatagtaacctaggggtgaaggatggcgactctggacgtaccagctgttgtgaacctgacattctggagactgatttcaatgccaatgacatacatgagggtacctcagaggttgctcagccacagaggttaaaaggggaagcagatctcttatgccttgaccagaagaatcaaaataactcaccttatcatgatgcttgccctgctactcagcagcccagtgttatccaagcagagaaaaacaaaccacaaccacttcctactgaaggagctgagtcaactcaccaagctgcccatattcagctaagcaatccaagttcactgtcaaacatcgacttttatgcccaggtgagcgacattacaccagcaggtagtgtggtcctttccccgggccaaaagaataaggcagggatgtcccaatgtgacatgcacccggaaatggtctcactctgccaagaaaacttccttatggacaatgcctacttctgtgaggcagatgccaaaaagtgcatccctgtggctcctcacatcaaggttgaatcacacatacagccaagcttaaaccaagaggacatttacatcaccacagaaagccttaccactgctgctgggaggcctgggacaggagaacatgttccaggttctgagatgcctgtcccagactatacctccattcatatagtacagtccccacagggcctcatactcaatgcgactgccttgcccttgcctgacaaagagtttctctcatcatgtggctatgtgagcacagaccaactgaacaaaatcatgccttagcctttctttggtttcccaagagctacgtatttaatagcaaagaattgactggggcaataacgtttaagccaaaacaatgtttaaaccttttttgggggagtgacaggatggggtatggattctaaaatgccttttcccaaaatgttgaaatatgatgttaaaaaaataagaagaatgcttaatcagatagatattcctattgtgcaatgtaaatattttaaagaattgtgtcagactgtttagtagcagtgattgtcttaatattgtgggtgttaatttttgatactaagcattgaatggctatgtttttaatgtatagtaaatcacgctttttgaaaaagcgaaaaaatcaggtggcttttgcggttcaggaaaattgaatgcaaaccatagcacaggctaattttttgttgtttcttaaataagaaacttttttatttaaaaaactaaaaactagaggtgagaaatttaaactataagcaagaaggcaaaaatagtttggatatgtaaaacatttattttgacataaagttgataaagattttttaataatttagacttcaagcatggctattttatattacactacacactgtgtactgcagttggtatgacccctctaaggagtgtagcaactacagtctaaagctggtttaatgttttggccaatgcacctaaagaaaaacaaactcgttttttacaaagcccttttatacctccccagactccttcaacaattctaaaatgattgtagtaatctgcattattggaatataattgttttatctgaatttttaaacaagtatttgttaatttagaaaactttaaagcgtttgcacagatcaacttaccaggcaccaaaagaagtaaaagcaaaaaagaaaacctttcttcaccaaatcttggttgatgccaaaaaaaaatacatgctaagagaagtagaaatcatagctggttcacactgaccaagatacttaagtgctgcaattgcacgcggagtgagttttttagtgcgtgcagatggtgagagataagatctatagcctctgcagcggaatctgttcacacccaacttggttttgctacataattatccaggaagggaataaggtacaagaagcattttgtaagttgaagcaaatcgaatgaaattaactgggtaatgaaacaaagagttcaagaaataagtttttgtttcacagcctataaccagacacatactcatttttcatgataatgaacagaacatagacagaagaaacaaggttttcagtccccacagataactgaaaattatttaaaccgctaaaagaaactttctttctcactaaatcttttataggatttatttaaaatagcaaaagaagaagtttcatcattttttacttcctctctgagtggactggcctcaaagcaagcattcagaagaaaaagaagcaacctcagtaatttagaaatcattttgcaatcccttaatatcctaaacatcattcatttttgttgttgttgttgttgttgagacagagtctcgctctgtcgccaggctagagtgcggtggcgcgatcttgactcactgcaatctccacctcccacaggttcaggcgattcccgtgcctcagcctcctgagtagctgggactacaggcacgcaccaccatgccaggctaatttttttgtattttagcagagacggggtttcaccatgttggccaggatggtctcgatctcctgacctcgtgatccacccgactcggcctcccaaagtgctgggattacaggtgtaagccaccgtgcccagccctaaacatcattcttgagagcattgggatatctcctgaaaaggtttatgaaaaagaagaatctcatctcagtgaagaatacttctcattttttaaaaaagcttaaaactttgaagttagctttaacttaaatagtatttcccatttatcgcagaccttttttaggaagcaagcttaatggctgataattttaaattctctctcttgcaggaaggactatgaaaagctagaattgagtgtttaaagttcaacatgttatttgtaatagatgtttgatagattttctgctactttgctgctatggttttctccaagagctacataatttagtttcatataaagtatcatcagtgtagaacctaattcaattcaaagctgtgtgtttggaagactatcttactatttcacaacagcctgacaacatttctatagccaaaaatagctaaatacctcaatcagtctcagaatgtcattttggtactttggtggccacataagccattattcactagtatgactagttgtgtctggcagtttatatttaactctctttatgtctgtggattttttccttcaaagtttaataaatttattttcttggattcctgatagtgtgcttctgttatcaaacaccaacataaaaatgatctaaaccactctgtatactgtgaattatcattgtaaggagagcttagcaccactggatcaaatacatcagcattgggtatggagatttttatgtgctgagatatagagagggaaacatatcccccttcccttattttttgagaagacaaaagcccaactcagaaatatcccactggcttggccctccccttaggctgtgactccccataggcaaaggttcatagagctgtgtatttgatgcatcatggaaaataaatgacatgggtgttggatgagggagagtgatatgtgagcattatctttacatttccagcttgagcatgttgtctggaaggaaggaaagcagctcttcctctgccattcacccattggcctaagtcagtttattggactagctgcttgttatcatgggaatcagctaataagtcaggcttgggaggaaggctgattaggtaagttgtgtaggagcctgagagagccatgaagtttagattcctacagcaggaggcaggatgcaggtgaggtagctgctgaaccctaggctcctgagcaggcactggattctgagatgtaggaatctggtgaggacattgataaacctactaaacaatgacgtattgcttcagcaagtcaaatgcaaagtgccacaactttttataatactcaagtgttatgttaaaaaaaaaaaatgtcttcacctgctgccctctgccctgtgagcagccattacctgaaagaaccatggagtgaagcctcagggcttcttcatatagatgctttaagatatgaggagtacagggaaaagaaagcctgcctacttccatggattgaaataacacaattctatttcagaagattaatggtgtgttgaaaatggctacacacatctttcagcatttcaatttctcaaagtttctactaacactttattcaagtgctataatatttacatatttacatatttgtataccaaaatatgtcttgttatgtgcttgttttagggtaagaaatagtgaccagaaaaaccagaagttacttaaatctaaactttttagtttggaatccaagatcccacataatttgccccagtctcctttgagagtttaaaatttaagacctagatgtaaagggcacagcttctgaataagaatttgatgtttggttaacattcaaactctattgctgtggaaatctaatgagcatatgatgtcagctatgttacacgggaaacattgctcatagtttaaatgatctctgactgataaatgacatctggatagggagaaactataaccacctggagataagttatactttggacttgagtgtagtgacttgtaattaagcatttcccctatagaaactctggaagctatgtttctggagatgtaacaagagtaactggctccagtgaggcatagagcttctaagcctgggagactcctttacctgcccaataccttctctgaatctgagctgccagttgtaggaggagaggaaggaaaagaccttctggatagctatataaacagctgtttagattgcttcatgcactgttatcattactgtgactctaaagcagaaagcctgatgctgtatcccttctgtcctacatccctctgagtagactggaaccaagtatggtgaatctggggaatgtgtggttgagcctaagaagatccccttgcatatgtagcaaaagacacttgccatttcttgaacaaagtttgtgctttcccatctctatgttcttggtcatgcctcctccttcaactaaaaagctcccacttaccaaccctgcctgtcaagattcccttcatccttcatggcccagctctaatgcctccttcatgaactctcctctgattcccaccatccaatcagtgattttttcttctgaaccatgtttaatggtgtttatcacattactttggtagctcacctgacaaacggctagtatagatttaccagtatgtacgctggtgaatatctatctccaaaatgcccttgaatggataattttgtggt

SEQ ID NO: 3 - DNA, 4414 bp, homo sapien
ccgcgctctctgatcagaggcgaagctcggaggtcctacaggtatggatctctggcagctgctgttgaccttggcactggcaggatcaagtgatgctttttctggaagtgaggccacagcagctatccttagcagagcaccctggagtctgcaaagtgttaatccaggcctaaagacaaattcttctaaggagcctaaattcaccaagtgccgttcacctgagcgagagactttttcatgccactggacagatgaggttcatcatggtacaaagaacctaggacccatacagctgttctataccagaaggaacactcaagaatggactcaagaatggaaagaatgccctgattatgtttctgctggggaaaacagctgttactttaattcatcgtttacctccatctggataccttattgtatcaagctaactagcaatggtggtacagtggatgaaaagtgtttctctgttgatgaaatagtgcaaccagatccacccattgccctcaactggactttactgaacgtcagtttaactgggattcatgcagatatccaagtgagatgggaagcaccacgcaatgcagatattcagaaaggatggatggttctggagtatgaacttcaatacaaagaagtaaatgaaactaaatggaaaatgatggaccctatattgacaacatcagttccagtgtactcattgaaagtggataaggaatatgaagtgcgtgtgagatccaaacaacgaaactctggaaattatggcgagttcagtgaggtgctctatgtaacacttcctcagatgagccaatttacatgtgaagaagatttctactttccatggctcttaattattatctttggaatatttgggctaacagtgatgctatttgtattcttattttctaaacagcaaaggattaaaatgctgattctgcccccagttccagttccaaagattaaaggaatcgatccagatctcctcaaggaaggaaaattagaggaggtgaacacaatcttagccattcatgatagctataaacccgaattccacagtgatgactcttgggttgaatttattgagctagatattgatgagccagatgaaaagactgaggaatcagacacagacagacttctaagcagtgaccatgagaaatcacatagtaacctaggggtgaaggatggcgactctggacgtaccagctgttgtgaacctgacattctggagactgatttcaatgccaatgacatacatgagggtacctcagaggttgctcagccacagaggttaaaaggggaagcagatctcttatgccttgaccagaagaatcaaaataactcaccttatcatgatgcttgccctgctactcagcagcccagtgttatccaagcagagaaaaacaaaccacaaccacttcctactgaaggagctgagtcaactcaccaagctgcccatattcagctaagcaatccaagttcactgtcaaacatcgacttttatgcccaggtgagcgacattacaccagcaggtagtgtggtcctttccccgggccaaaagaataaggcagggatgtcccaatgtgacatgcacccggaaatggtctcactctgccaagaaaacttccttatggacaatgcctacttctgtgaggcagatgccaaaaagtgcatccctgtggctcctcacatcaaggttgaatcacacatacagccaagcttaaaccaagaggacatttacatcaccacagaaagccttaccactgctgctgggaggcctgggacaggagaacatgttccaggttctgagatgcctgtcccagactatacctccattcatatagtacagtccccacagggcctcatactcaatgcgactgccttgcccttgcctgacaaagagtttctctcatcatgtggctatgtgagcacagaccaactgaacaaaatcatgccttagcctttctttggtttcccaagagctacgtatttaatagcaaagaattgactggggcaataacgtttaagccaaaacaatgtttaaaccttttttgggggagtgacaggatggggtatggattctaaaatgccttttcccaaaatgttgaaatatgatgttaaaaaaataagaagaatgcttaatcagatagatattcctattgtgcaatgtaaatattttaaagaattgtgtcagactgtttagtagcagtgattgtcttaatattgtgggtgttaatttttgatactaagcattgaatggctatgtttttaatgtatagtaaatcacgctttttgaaaaagcgaaaaaatcaggtggcttttgcggttcaggaaaattgaatgcaaaccatagcacaggctaattttttgttgtttcttaaataagaaacttttttatttaaaaaactaaaaactagaggtgagaaatttaaactataagcaagaaggcaaaaatagtttggatatgtaaaacatttactttgacataaagttgataaagattttttaataatttagacttcaagcatggctattttatattacactacacactgtgtactgcagttggtatgacccctctaaggagtgtagcaactacagtctaaagctggtttaatgttttggccaatgcacctaaagaaaaacaaactcgttttttacaaagcccttttatacctccccagactccttcaacaattctaaaatgattgtagtaatctgcattattggaatataattgttttatctgaatttttaaacaagtatttgttaatttagaaaactttaaagcgtttgcacagatcaacttaccaggcaccaaaagaagtaaaagcaaaaaagaaaacctttcttcaccaaatcttggttgatgccaaaaaaaaatacatgctaagagaagtagaaatcatagctggttcacactgaccaagatacttaagtgctgcaattgcacgcggagtgagttttttagtgcgtgcagatggtgagagataagatctatagcctctgcagcggaatctgttcacacccaacttggttttgctacataattatccaggaagggaataaggtacaagaagcattttgtaagttgaagcaaatcgaatgaaattaactgggtaatgaaacaaagagttcaagaaataagtttttgtttcacagcctataaccagacacatactcatttttcatgataatgaacagaacatagacagaagaaacaaggttttcagtccccacagataactgaaaattatttaaaccgctaaaagaaactttctttctcactaaatcttttataggatttatttaaaatagcaaaagaagaagtttcatcattttttacttcctctctgagtggactggcctcaaagcaagcattcagaagaaaaagaagcaacctcagtaatttagaaatcattttgcaatcccttaatatcctaaacatcattcatttttgttgttgttgttgttgttgagacagagtctcgctctgtcgccaggctagagtgcggtggcgcgatcttgactcactgcaatctccacctcccacaggttcaggcgattcccgtgcctcagcctcctgagtagctgggactacaggcacgcaccaccatgccaggctaatttttttgtattttagcagagacggggtttcaccatgttggccaggatggtctcgagtctcctgacctcgtgatccacccgactcggcctcccaaagtgctgggattacaggtgtaagccaccgtgcccagccctaaacatcattcttgagagcattgggatatctcctgaaaaggtttatgaaaaagaagaatctcatctcagtgaagaatacttctcattttttaaaaaagcttaaaactttgaagttagctttaacttaaatagtatttcccatttatcgcagaccttttttaggaagcaagcttaatggctgataattttaaattctctctcttgcaggaaggactatgaaaagctagaattgagtgtttaaagttcaacatgttatttgtaatagatgtttgatagattttctgctactttgctgctatggttttctccaagagctacataatttagtttcatataaagtatcatcagtgtagaacctaattcaattcaaagctgtgtgtttggaagactatcttactatttcacaacagcctgacaacatttctatagccaaaaatagctaaatacctcaatcagtctcagaatgtcattttggtactttggtggccacataagccattattcactagtatgactagttgtgtctggcagtttatatttaactctctttatgtctgtggattttttccttcaaagtttaataaatttattttcttggattcctgataatgtgcttctgttatcaaacaccaacataaaaatgatctaaacc

SEQ ID NO: 4 - DNA, 459 bp, homo sapien
  misc_feature (342)..(342): n is a, c, g, or t
tgtaatacgactactatagggcggccgcgaattcggcacgagcggcggcggcggcagcggcagcagcggctgctacagtggcggtggcggcggcggctgctgctgagcccgggcggcggcggggaccccgggctggggccacgcgggccggaggccccggcaccattggccccagcgcagacgcgaacccgcgctctctgatcagaggcgaagctcggaggtcctacaggtatggatctctggcagctgctgttgaccttggcactggcaggatcaagtgatgctttttctggaagtgaggccacagcagctatccttagcagagcaccctggagtctgcanagtgttaatccaggcctaaagacaaattcttctaaggagcctaaattcaccaagtgccgttcacctgagcgagagaacttttcatgccactggacagatgaagttcatcatggtaca

SEQ ID NO: 5 - DNA, 569 bp, homo sapien
  misc_feature (148)..(148): n is a, c, g, or t
gttttgtgcgggccgcagccgcacgttggcaccgatggaactggggtcagtagagtgacagccaccagtccgcatgaactggggtcctacaggtatggatctctggcagctgctgttgaccttggcactggcaggatcaagtgatgcntttttctggaagtgaggccacagcagctatccttagcagagcaccctggagtctgcaaagtgttaatccaggcctaaagacaagatggggtccatgctcacatatcaagaaaatggagtcttacatgcaagcctaatgcagagtagagaagctcaccaacttgaaggaagcatgaatgaaattacaaggaaatctagcttagaaaaattaaccctgtagcttggtttttccactctttgctcttggcaaaaggatcttacgggaaaactggagcttagagaacttatgtaacattactagcaagttgcacagctgggattcaaactgaaatccagctagcttcaaagactgtgttctttctgctgctgcatactacccctacctaccaaggctctgagattagaaagcaggatgggtgtgt

SEQ ID NO: 6 - DNA, 421 bp, homo sapien
gcgcgtgaacacagcgcgcagagcgcgcggtcttttgcgcgtttgtgcgggccgcagccgcacgttggcaccgatggaactggggtcagtagagtgacagccaccagtccgcatgaactgggttaaaatgagcaacttctttaaccagaactgaccttgaagacaaatggctaaaataaaacatttgctgaattcactgggcgcatcttacaagtaatttttggattctgcattgactacctacaagtgccttctgggtgcaagtccacaggcaagatttgttctgcaaatcttccatgaccaaggtcacctctttggattggcagacccagggagtccatattgggaagataaattcacacttcaccccttgttgagatctccagccttgctcctctgataaccaggtcctacaggtatg

SEQ ID NO: 7 - DNA, 434 bp, homo sapien
tgagatctccatccagccttgctcctctgataaccagtttttggcatctcagatgaggaagagtgatgggcgacaggtgatggtgacaactattaataagatctgaaagtaaacagtctcatgaaaggtggccaggagagggcagtcaccttttatcaggagcacagactgaatttgcaaagggtcctacaggtatggatctctggcagctgctgttgaccttggcactggcaggatcaagtgatgctttttctggaagtgaggctctgaaatacctacttccaagagaacgaaatttattcaagaaatgttggatggaaattgaagagtgagcttggaaacgagacacagagtggcaggagcccagaccaacctgtttatgaaagatgcctttgcccatagagggaaaaatacaccttaaaacctcaaaaaaa

SEQ ID NO: 8 - DNA, 2177 bp, homo sapien
cgaagctcggaggtcctacaggtatggatctctggcagctgctgttgaccttggcactggcaggatcaagtgatgctttttctggaagtgaggccacagcagctatccttagcagagcaccctggagtctgcaaagtgttaatccaggcctaaagacaagaacactcaagaatggactcaagaatggaaagaatgccctgattatgtttctgctggggaaaacagctgttactttaattcatcgtttacctccatctggataccttattgtatcaagctaactagcaatggtggtacagtggatgaaaagtgtttctctgttgatgaaatagtgcaaccagatccacccattgccctcaactggactttactgaacgtcagtttaactgggattcatgcagatatccaagtgagatgggaagcaccacgcaatgcagatattcagaaagggtggatggttctggagtatgaacttcaatacaaagaagtaaatgaaactaaatggaaaatgatggaccctatattgacaacatcagttccagtgtactcattgaaagtggataaggaatatgaagtgcgtgtgagatccaaacaacgaaactctggaaattatggcgagttcagtgaggtgctctatgtaacacttcctcagatgagccaatttacatgtgaagaagatttctactttccatggctcttaattattatctttggaatatttgggctaacagtgatgctatttgtattcttattttctaaacagcaaaggattaaaatgctgattctgcccccagttccagttccaaagattaaaggaatcgatccagatctcctcaaggaaggaaaattagaggaggtgaacacaatcttagccattcatgatagctataaacccgaattccacagtgatgactcttgggttgaatttattgagctagatattgatgagccagatgaaaagactgaggaatcagacacagacagacttctaagcagtgaccatgagaaatcacatagtaacctaggggtgaaggatggcgactctggacgtaccagctgttgtgaacctgacattctggagactgatttcaatgccaatgacatacatgagggtacctcagaggttgctcagccacagaggttaaaaggggaagcagatctcttatgccttgaccagaagaatcaaaataactcaccttatcatgatgcttgccctgctactcagcagcccagtgttatccaagcagagaaaaacaaaccacaaccacttcctactgaaggagctgagtcaactcaccaagctgcccatattcagctaagcaatccaagttcactgtcaaacatcgacttttatgcccaggtgagcgacattacaccagcaggtagtgtggtcctttccccgggccaaaagaataaggcagggatgtcccaatgtgacatgcacccggaaatggtctcactctgccaagaaaacttccttatggacaatgcctacttctgtgaggcagatgccaaaaagtgcctccctgtggctcctcacatcaaggttgaatcacacatacagccaagcttaaaccaagaggacatttacatcaccacagaaagccttaccactgctgctgggaggcctgggacaggagaacatgttccaggttctgagatgcctgtcccagactatacctccattcatatagtacagtccccacagggcctcatactcaatgcgactgccttgcccttgcctgacaaagagtttctctcatcatgtggctatgtgagcacagaccaactgaacaaaatcatgccttagcctttctttggtttcccaagagctacgtatttaatagcaaagaattgactggggcaataacgtttaagccaaaacaatgtttaaaccttttttgggggagtgacaggatggggtatggattctaaaatgccttttcccaaaatgttgaaatatgatgttaaaaaaataagaagaatgcttaatcagatagatattcctattgtgcaatgtaaatattttaaagaattgtgtcagactgtttagtagcagtgattgtcttaatattgtgggtgttaatttttgatactaagcattgaatgactatgtttttaatgtatagtaaatcacgctttttgaaaaagcgaaaaaatcaggtggcttttgcggt

SEQ ID NO: 9 - DNA, 4529 bp, homo sapien
ggagagactggggaggtcgagctgtgcgcgtggacacagcgcgcagagcgcgcggtcttttgcgcgtttgtgcgggccgcagccgcacgttggcaccgatggaactggggtcagtagagtgacagccaccagtccgcatgaactggggtcctacaggtatggatctctggcagctgctgttgaccttggcactggcaggatcaagtgatgctttttctggaagtgaggccacagcagctatccttagcagagcaccctggagtctgcaaagtgttaatccaggcctaaagacaaattcttctaaggagcctaaattcaccaagtgccgttcacctgagcgagagactttttcatgccactggacagatgaggttcatcatggtacaaagaacctaggacccatacagctgttctataccagaaggaacactcaagaatggactcaagaatggaaagaatgccctgattatgtttctgctggggaaaacagctgttactttaattcatcgtttacctccatctggataccttattgtatcaagctaactagcaatggtggtacagtggatgaaaagtgtttctctgttgatgaaatagtgcaaccagatccacccattgccctcaactggactttactgaacgtcagtttaactgggattcatgcagatatccaagtgagatgggaagcaccacgcaatgcagatattcagaaaggatggatggttctggagtatgaacttcaatacaaagaagtaaatgaaactaaatggaaaatgatggaccctatattgacaacatcagttccagtgtactcattgaaagtggataaggaatatgaagtgcgtgtgagatccaaacaacgaaactctggaaattatggcgagttcagtgaggtgctctatgtaacacttcctcagatgagccaatttacatgtgaagaagatttctactttccatggctcttaattattatctttggaatatttgggctaacagtgatgctatttgtattcttattttctaaacagcaaaggattaaaatgctgattctgcccccagttccagttccaaagattaaaggaatcgatccagatctcctcaaggaaggaaaattagaggaggtgaacacaatcttagccattcatgatagctataaacccgaattccacagtgatgactcttgggttgaatttattgagctagatattgatgagccagatgaaaagactgaggaatcagacacagacagacttctaagcagtgaccatgagaaatcacatagtaacctaggggtgaaggatggcgactctggacgtaccagctgttgtgaacctgacattctggagactgatttcaatgccaatgacatacatgagggtacctcagaggttgctcagccacagaggttaaaaggggaagcagatctcttatgccttgaccagaagaatcaaaataactcaccttatcatgatgcttgccctgctactcagcagcccagtgttatccaagcagagaaaaacaaaccacaaccacttcctactgaaggagctgagtcaactcaccaagctgcccatattcagctaagcaatccaagttcactgtcaaacatcgacttttatgcccaggtgagcgacattacaccagcaggtagtgtggtcctttccccgggccaaaagaataaggcagggatgtcccaatgtgacatgcacccggaaatggtctcactctgccaagaaaacttccttatggacaatgcctacttctgtgaggcagatgccaaaaagtgcatccctgtggctcctcacatcaaggttgaatcacacatacagccaagcttaaaccaagaggacatttacatcaccacagaaagccttaccactgctgctgggaggcctgggacaggagaacatgttccaggttctgagatgcctgtcccagactatacctccattcatatagtacagtccccacagggcctcatactcaatgcgactgccttgcccttgcctgacaaagagtttctctcatcatgtggctatgtgagcacagaccaactgaacaaaatcatgccttagcctttctttggtttcccaagagctacgtatttaatagcaaagaattgactggggcaataacgtttaagccaaaacaatgtttaaaccttttttgggggagtgacaggatggggtatggattctaaaatgccttttcccaaaatgttgaaatatgatgttaaaaaaataagaagaatgcttaatcagatagatattcctattgtgcaatgtaaatattttaaagaattgtgtcagactgtttagtagcagtgattgtcttaatattgtgggtgttaatttttgatactaagcattgaatggctatgtttttaatgtatagtaaatcacgctttttgaaaaagcgaaaaaatcaggtggcttttgcggttcaggaaaattgaatgcaaaccatagcacaggctaattttttgttgtttcttaaataagaaacttttttatttaaaaaactaaaaactagaggtgagaaatttaaactataagcaagaaggcaaaaatagtttggatatgtaaaacatttattttgacataaagttgataaagattttttaataatttagacttcaagcatggctattttatattacactacacactgtgtactgcagttggtatgacccctctaaggagtgtagcaactacagtctaaagctggtttaatgttttggccaatgcacctaaagaaaaacaaactcgttttttacaaagcccttttatacctccccagactccttcaacaattctaaaatgattgtagtaatctgcattattggaatataattgttttatctgaatttttaaacaagtatttgttaatttagaaaactttaaagcgtttgcacagatcaacttaccaggcaccaaaagaagtaaaagcaaaaaagaaaacctttcttcaccaaatcttggttgatgccaaaaaaaaatacatgctaagagaagtagaaatcatagctggttcacactgaccaagatacttaagtgctgcaattgcacgcggagtgagttttttagtgcgtgcagatggtgagagataagatctatagcctctgcagcggaatctgttcacacccaacttggttttgctacataattatccaggaagggaataaggtacaagaagcattttgtaagttgaagcaaatcgaatgaaattaactgggtaatgaaacaaagagttcaagaaataagtttttgtttcacagcctataaccagacacatactcatttttcatgataatgaacagaacatagacagaagaaacaaggttttcagtccccacagataactgaaaattatttaaaccgctaaaagaaactttctttctcactaaatcttttataggatttatttaaaatagcaaaagaagaagtttcatcattttttacttcctctctgagtggactggcctcaaagcaagcattcagaagaaaaagaagcaacctcagtaatttagaaatcattttgcaatcccttaatatcctaaacatcattcatttttgttgttgttgttgttgttgagacagagtctcgctctgtcgccaggctagagtgcggtggcgcgatcttgactcactgcaatctccacctcccacaggttcaggcgattcccgtgcctcagcctcctgagtagctgggactacaggcacgcaccaccatgccaggctaatttttttgtattttagcagagacggggtttcaccatgttggccaggatggtctcgatctcctgacctcgtgatccacccgactcggcctcccaaagtgctgggattacaggtgtaagccaccgtgcccagccctaaacatcattcttgagagcattgggatatctcctgaaaaggtttatgaaaaagaagaatctcatctcagtgaagaatacttctcattttttaaaaaagcttaaaactttgaagttagctttaacttaaatagtatttcccatttatcgcagaccttttttaggaagcaagcttaatggctgataattttaaattctctctcttgcaggaaggactatgaaaagctagaattgagtgtttaaagttcaacatgttatttgtaatagatgtttgatagattttctgctactttgctgctatggttttctccaagagctacataatttagtttcatataaagtatcatcagtgtagaacctaattcaattcaaagctgtgtgtttggaagactatcttactatttcacaacagcctgacaacatttctatagccaaaaatagctaaatacctcaatcagtctcagaatgtcattttggtactttggtggccacataagccattattcactagtatgactagttgtgtctggcagtttatatttaactctctttatgtctgtggattttttccttcaaagtttaataaatttattttcttggattcctgatagtgtgcttctgttatcaaacaccaacataaaaatgatctaaacca

SEQ ID NO: 10 - DNA, 4814 bp, homo sapien
ggagagactggggaggtcgagctgtgcgcgtggacacagcgcgcagagcgcgcggtcttttgcgcgtttgtgcgggccgcagccgcacgttggcaccgatggaactggggtcagtagagtgacagccaccagtccgcatgaactgggttaaaatgagcaacttctttaaccagaactgaccttgaagacaaatggctaaaataaaacatttgctgaattcactgggcgcatcttacaagtaatttttggattctgcattgactacctacaagtgccttctgggtgcaagtccacaggcaagatttgttctgcaaatcttccatgaccaaggtcacctctttggattggcagacccagggagtccatattgggaagataaattcacacttcaccccttgttgagatctccagccttgctcctctgataaccaggtcctacaggtatggatctctggcagctgctgttgaccttggcactggcaggatcaagtgatgctttttctggaagtgaggccacagcagctatccttagcagagcaccctggagtctgcaaagtgttaatccaggcctaaagacaaattcttctaaggagcctaaattcaccaagtgccgttcacctgagcgagagactttttcatgccactggacagatgaggttcatcatggtacaaagaacctaggacccatacagctgttctataccagaaggaacactcaagaatggactcaagaatggaaagaatgccctgattatgtttctgctggggaaaacagctgttactttaattcatcgtttacctccatctggataccttattgtatcaagctaactagcaatggtggtacagtggatgaaaagtgtttctctgttgatgaaatagtgcaaccagatccacccattgccctcaactggactttactgaacgtcagtttaactgggattcatgcagatatccaagtgagatgggaagcaccacgcaatgcagatattcagaaaggatggatggttctggagtatgaacttcaatacaaagaagtaaatgaaactaaatggaaaatgatggaccctatattgacaacatcagttccagtgtactcattgaaagtggataaggaatatgaagtgcgtgtgagatccaaacaacgaaactctggaaattatggcgagttcagtgaggtgctctatgtaacacttcctcagatgagccaatttacatgtgaagaagatttctactttccatggctcttaattattatctttggaatatttgggctaacagtgatgctatttgtattcttattttctaaacagcaaaggattaaaatgctgattctgcccccagttccagttccaaagattaaaggaatcgatccagatctcctcaaggaaggaaaattagaggaggtgaacacaatcttagccattcatgatagctataaacccgaattccacagtgatgactcttgggttgaatttattgagctagatattgatgagccagatgaaaagactgaggaatcagacacagacagacttctaagcagtgaccatgagaaatcacatagtaacctaggggtgaaggatggcgactctggacgtaccagctgttgtgaacctgacattctggagactgatttcaatgccaatgacatacatgagggtacctcagaggttgctcagccacagaggttaaaaggggaagcagatctcttatgccttgaccagaagaatcaaaataactcaccttatcatgatgcttgccctgctactcagcagcccagtgttatccaagcagagaaaaacaaaccacaaccacttcctactgaaggagctgagtcaactcaccaagctgcccatattcagctaagcaatccaagttcactgtcaaacatcgacttttatgcccaggtgagcgacattacaccagcaggtagtgtggtcctttccccgggccaaaagaataaggcagggatgtcccaatgtgacatgcacccggaaatggtctcactctgccaagaaaacttccttatggacaatgcctacttctgtgaggcagatgccaaaaagtgcatccctgtggctcctcacatcaaggttgaatcacacatacagccaagcttaaaccaagaggacatttacatcaccacagaaagccttaccactgctgctgggaggcctgggacaggagaacatgttccaggttctgagatgcctgtcccagactatacctccattcatatagtacagtccccacagggcctcatactcaatgcgactgccttgcccttgcctgacaaagagtttctctcatcatgtggctatgtgagcacagaccaactgaacaaaatcatgccttagcctttctttggtttcccaagagctacgtatttaatagcaaagaattgactggggcaataacgtttaagccaaaacaatgtttaaaccttttttgggggagtgacaggatggggtatggattctaaaatgccttttcccaaaatgttgaaatatgatgttaaaaaaataagaagaatgcttaatcagatagatattcctattgtgcaatgtaaatattttaaagaattgtgtcagactgtttagtagcagtgattgtcttaatattgtgggtgttaatttttgatactaagcattgaatggctatgtttttaatgtatagtaaatcacgctttttgaaaaagcgaaaaaatcaggtggcttttgcggttcaggaaaattgaatgcaaaccatagcacaggctaattttttgttgtttcttaaataagaaacttttttatttaaaaaactaaaaactagaggtgagaaatttaaactataagcaagaaggcaaaaatagtttggatatgtaaaacatttattttgacataaagttgataaagattttttaataatttagacttcaagcatggctattttatattacactacacactgtgtactgcagttggtatgacccctctaaggagtgtagcaactacagtctaaagctggtttaatgttttggccaatgcacctaaagaaaaacaaactcgttttttacaaagcccttttatacctccccagactccttcaacaattctaaaatgattgtagtaatctgcattattggaatataattgttttatctgaatttttaaacaagtatttgttaatttagaaaactttaaagcgtttgcacagatcaacttaccaggcaccaaaagaagtaaaagcaaaaaagaaaacctttcttcaccaaatcttggttgatgccaaaaaaaaatacatgctaagagaagtagaaatcatagctggttcacactgaccaagatacttaagtgctgcaattgcacgcggagtgagttttttagtgcgtgcagatggtgagagataagatctatagcctctgcagcggaatctgttcacacccaacttggttttgctacataattatccaggaagggaataaggtacaagaagcattttgtaagttgaagcaaatcgaatgaaattaactgggtaatgaaacaaagagttcaagaaataagtttttgtttcacagcctataaccagacacatactcatttttcatgataatgaacagaacatagacagaagaaacaaggttttcagtccccacagataactgaaaattatttaaaccgctaaaagaaactttctttctcactaaatcttttataggatttatttaaaatagcaaaagaagaagtttcatcattttttacttcctctctgagtggactggcctcaaagcaagcattcagaagaaaaagaagcaacctcagtaatttagaaatcattttgcaatcccttaatatcctaaacatcattcatttttgttgttgttgttgttgttgagacagagtctcgctctgtcgccaggctagagtgcggtggcgcgatcttgactcactgcaatctccacctcccacaggttcaggcgattcccgtgcctcagcctcctgagtagctgggactacaggcacgcaccaccatgccaggctaatttttttgtattttagcagagacggggtttcaccatgttggccaggatggtctcgatctcctgacctcgtgatccacccgactcggcctcccaaagtgctgggattacaggtgtaagccaccgtgcccagccctaaacatcattcttgagagcattgggatatctcctgaaaaggtttatgaaaaagaagaatctcatctcagtgaagaatacttctcattttttaaaaaagcttaaaactttgaagttagctttaacttaaatagtatttcccatttatcgcagaccttttttaggaagcaagcttaatggctgataattttaaattctctctcttgcaggaaggactatgaaaagctagaattgagtgtttaaagttcaacatgttatttgtaatagatgtttgatagattttctgctactttgctgctatggttttctccaagagctacataatttagtttcatataaagtatcatcagtgtagaacctaattcaattcaaagctgtgtgtttggaagactatcttactatttcacaacagcctgacaacatttctatagccaaaaatagctaaatacctcaatcagtctcagaatgtcattttggtactttggtggccacataagccattattcactagtatgactagttgtgtctggcagtttatatttaactctctttatgtctgtggattttttccttcaaagtttaataaatttattttcttggattcctgatagtgtgcttctgttatcaaacaccaacataaaaatgatctaaacca

SEQ ID NO: 11 - DNA, 4522 bp, homo sapien
gcctgtctgtttgtgccgccaggagaccttggaagggacagagaaagagctggggttttgccatgttgcccaggctgatctccaacacctgggatcaagcagtctgcccaccttggcctcccaaagtgctgaaattacaggtcctacaggtatggatctctggcagctgctgttgaccttggcactggcaggatcaagtgatgctttttctggaagtgaggccacagcagctatccttagcagagcaccctggagtctgcaaagtgttaatccaggcctaaagacaaattcttctaaggagcctaaattcaccaagtgccgttcacctgagcgagagactttttcatgccactggacagatgaggttcatcatggtacaaagaacctaggacccatacagctgttctataccagaaggaacactcaagaatggactcaagaatggaaagaatgccctgattatgtttctgctggggaaaacagctgttactttaattcatcgtttacctccatctggataccttattgtatcaagctaactagcaatggtggtacagtggatgaaaagtgtttctctgttgatgaaatagtgcaaccagatccacccattgccctcaactggactttactgaacgtcagtttaactgggattcatgcagatatccaagtgagatgggaagcaccacgcaatgcagatattcagaaaggatggatggttctggagtatgaacttcaatacaaagaagtaaatgaaactaaatggaaaatgatggaccctatattgacaacatcagttccagtgtactcattgaaagtggataaggaatatgaagtgcgtgtgagatccaaacaacgaaactctggaaattatggcgagttcagtgaggtgctctatgtaacacttcctcagatgagccaatttacatgtgaagaagatttctactttccatggctcttaattattatctttggaatatttgggctaacagtgatgctatttgtattcttattttctaaacagcaaaggattaaaatgctgattctgcccccagttccagttccaaagattaaaggaatcgatccagatctcctcaaggaaggaaaattagaggaggtgaacacaatcttagccattcatgatagctataaacccgaattccacagtgatgactcttgggttgaatttattgagctagatattgatgagccagatgaaaagactgaggaatcagacacagacagacttctaagcagtgaccatgagaaatcacatagtaacctaggggtgaaggatggcgactctggacgtaccagctgttgtgaacctgacattctggagactgatttcaatgccaatgacatacatgagggtacctcagaggttgctcagccacagaggttaaaaggggaagcagatctcttatgccttgaccagaagaatcaaaataactcaccttatcatgatgcttgccctgctactcagcagcccagtgttatccaagcagagaaaaacaaaccacaaccacttcctactgaaggagctgagtcaactcaccaagctgcccatattcagctaagcaatccaagttcactgtcaaacatcgacttttatgcccaggtgagcgacattacaccagcaggtagtgtggtcctttccccgggccaaaagaataaggcagggatgtcccaatgtgacatgcacccggaaatggtctcactctgccaagaaaacttccttatggacaatgcctacttctgtgaggcagatgccaaaaagtgcatccctgtggctcctcacatcaaggttgaatcacacatacagccaagcttaaaccaagaggacatttacatcaccacagaaagccttaccactgctgctgggaggcctgggacaggagaacatgttccaggttctgagatgcctgtcccagactatacctccattcatatagtacagtccccacagggcctcatactcaatgcgactgccttgcccttgcctgacaaagagtttctctcatcatgtggctatgtgagcacagaccaactgaacaaaatcatgccttagcctttctttggtttcccaagagctacgtatttaatagcaaagaattgactggggcaataacgtttaagccaaaacaatgtttaaaccttttttgggggagtgacaggatggggtatggattctaaaatgccttttcccaaaatgttgaaatatgatgttaaaaaaataagaagaatgcttaatcagatagatattcctattgtgcaatgtaaatattttaaagaattgtgtcagactgtttagtagcagtgattgtcttaatattgtgggtgttaatttttgatactaagcattgaatggctatgtttttaatgtatagtaaatcacgctttttgaaaaagcgaaaaaatcaggtggcttttgcggttcaggaaaattgaatgcaaaccatagcacaggctaattttttgttgtttcttaaataagaaacttttttatttaaaaaactaaaaactagaggtgagaaatttaaactataagcaagaaggcaaaaatagtttggatatgtaaaacatttattttgacataaagttgataaagattttttaataatttagacttcaagcatggctattttatattacactacacactgtgtactgcagttggtatgacccctctaaggagtgtagcaactacagtctaaagctggtttaatgttttggccaatgcacctaaagaaaaacaaactcgttttttacaaagcccttttatacctccccagactccttcaacaattctaaaatgattgtagtaatctgcattattggaatataattgttttatctgaatttttaaacaagtatttgttaatttagaaaactttaaagcgtttgcacagatcaacttaccaggcaccaaaagaagtaaaagcaaaaaagaaaacctttcttcaccaaatcttggttgatgccaaaaaaaaatacatgctaagagaagtagaaatcatagctggttcacactgaccaagatacttaagtgctgcaattgcacgcggagtgagttttttagtgcgtgcagatggtgagagataagatctatagcctctgcagcggaatctgttcacacccaacttggttttgctacataattatccaggaagggaataaggtacaagaagcattttgtaagttgaagcaaatcgaatgaaattaactgggtaatgaaacaaagagttcaagaaataagtttttgtttcacagcctataaccagacacatactcatttttcatgataatgaacagaacatagacagaagaaacaaggttttcagtccccacagataactgaaaattatttaaaccgctaaaagaaactttctttctcactaaatcttttataggatttatttaaaatagcaaaagaagaagtttcatcattttttacttcctctctgagtggactggcctcaaagcaagcattcagaagaaaaagaagcaacctcagtaatttagaaatcattttgcaatcccttaatatcctaaacatcattcatttttgttgttgttgttgttgttgagacagagtctcgctctgtcgccaggctagagtgcggtggcgcgatcttgactcactgcaatctccacctcccacaggttcaggcgattcccgtgcctcagcctcctgagtagctgggactacaggcacgcaccaccatgccaggctaatttttttgtattttagcagagacggggtttcaccatgttggccaggatggtctcgatctcctgacctcgtgatccacccgactcggcctcccaaagtgctgggattacaggtgtaagccaccgtgcccagccctaaacatcattcttgagagcattgggatatctcctgaaaaggtttatgaaaaagaagaatctcatctcagtgaagaatacttctcattttttaaaaaagcttaaaactttgaagttagctttaacttaaatagtatttcccatttatcgcagaccttttttaggaagcaagcttaatggctgataattttaaattctctctcttgcaggaaggactatgaaaagctagaattgagtgtttaaagttcaacatgttatttgtaatagatgtttgatagattttctgctactttgctgctatggttttctccaagagctacataatttagtttcatataaagtatcatcagtgtagaacctaattcaattcaaagctgtgtgtttggaagactatcttactatttcacaacagcctgacaacatttctatagccaaaaatagctaaatacctcaatcagtctcagaatgtcattttggtactttggtggccacataagccattattcactagtatgactagttgtgtctggcagtttatatttaactctctttatgtctgtggattttttccttcaaagtttaataaatttattttcttggattcctgatagtgtgcttctgttatcaaacaccaacataaaaatgatctaaacca

SEQ ID NO: 12 - DNA, 4491 bp, homo sapien
cctcttctcagctgatttggctgcctccattgtaataggcctcatgagactccagcctaggcctggccttcagttcagcaggcagagcccagagatgtactgggcaaaggtcctacaggtatggatctctggcagctgctgttgaccttggcactggcaggatcaagtgatgctttttctggaagtgaggccacagcagctatccttagcagagcaccctggagtctgcaaagtgttaatccaggcctaaagacaaattcttctaaggagcctaaattcaccaagtgccgttcacctgagcgagagactttttcatgccactggacagatgaggttcatcatggtacaaagaacctaggacccatacagctgttctataccagaaggaacactcaagaatggactcaagaatggaaagaatgccctgattatgtttctgctggggaaaacagctgttactttaattcatcgtttacctccatctggataccttattgtatcaagctaactagcaatggtggtacagtggatgaaaagtgtttctctgttgatgaaatagtgcaaccagatccacccattgccctcaactggactttactgaacgtcagtttaactgggattcatgcagatatccaagtgagatgggaagcaccacgcaatgcagatattcagaaaggatggatggttctggagtatgaacttcaatacaaagaagtaaatgaaactaaatggaaaatgatggaccctatattgacaacatcagttccagtgtactcattgaaagtggataaggaatatgaagtgcgtgtgagatccaaacaacgaaactctggaaattatggcgagttcagtgaggtgctctatgtaacacttcctcagatgagccaatttacatgtgaagaagatttctactttccatggctcttaattattatctttggaatatttgggctaacagtgatgctatttgtattcttattttctaaacagcaaaggattaaaatgctgattctgcccccagttccagttccaaagattaaaggaatcgatccagatctcctcaaggaaggaaaattagaggaggtgaacacaatcttagccattcatgatagctataaacccgaattccacagtgatgactcttgggttgaatttattgagctagatattgatgagccagatgaaaagactgaggaatcagacacagacagacttctaagcagtgaccatgagaaatcacatagtaacctaggggtgaaggatggcgactctggacgtaccagctgttgtgaacctgacattctggagactgatttcaatgccaatgacatacatgagggtacctcagaggttgctcagccacagaggttaaaaggggaagcagatctcttatgccttgaccagaagaatcaaaataactcaccttatcatgatgcttgccctgctactcagcagcccagtgttatccaagcagagaaaaacaaaccacaaccacttcctactgaaggagctgagtcaactcaccaagctgcccatattcagctaagcaatccaagttcactgtcaaacatcgacttttatgcccaggtgagcgacattacaccagcaggtagtgtggtcctttccccgggccaaaagaataaggcagggatgtcccaatgtgacatgcacccggaaatggtctcactctgccaagaaaacttccttatggacaatgcctacttctgtgaggcagatgccaaaaagtgcatccctgtggctcctcacatcaaggttgaatcacacatacagccaagcttaaaccaagaggacatttacatcaccacagaaagccttaccactgctgctgggaggcctgggacaggagaacatgttccaggttctgagatgcctgtcccagactatacctccattcatatagtacagtccccacagggcctcatactcaatgcgactgccttgcccttgcctgacaaagagtttctctcatcatgtggctatgtgagcacagaccaactgaacaaaatcatgccttagcctttctttggtttcccaagagctacgtatttaatagcaaagaattgactggggcaataacgtttaagccaaaacaatgtttaaaccttttttgggggagtgacaggatggggtatggattctaaaatgccttttcccaaaatgttgaaatatgatgttaaaaaaataagaagaatgcttaatcagatagatattcctattgtgcaatgtaaatattttaaagaattgtgtcagactgtttagtagcagtgattgtcttaatattgtgggtgttaatttttgatactaagcattgaatggctatgtttttaatgtatagtaaatcacgctttttgaaaaagcgaaaaaatcaggtggcttttgcggttcaggaaaattgaatgcaaaccatagcacaggctaattttttgttgtttcttaaataagaaacttttttatttaaaaaactaaaaactagaggtgagaaatttaaactataagcaagaaggcaaaaatagtttggatatgtaaaacatttattttgacataaagttgataaagattttttaataatttagacttcaagcatggctattttatattacactacacactgtgtactgcagttggtatgacccctctaaggagtgtagcaactacagtctaaagctggtttaatgttttggccaatgcacctaaagaaaaacaaactcgttttttacaaagcccttttatacctccccagactccttcaacaattctaaaatgattgtagtaatctgcattattggaatataattgttttatctgaatttttaaacaagtatttgttaatttagaaaactttaaagcgtttgcacagatcaacttaccaggcaccaaaagaagtaaaagcaaaaaagaaaacctttcttcaccaaatcttggttgatgccaaaaaaaaatacatgctaagagaagtagaaatcatagctggttcacactgaccaagatacttaagtgctgcaattgcacgcggagtgagttttttagtgcgtgcagatggtgagagataagatctatagcctctgcagcggaatctgttcacacccaacttggttttgctacataattatccaggaagggaataaggtacaagaagcattttgtaagttgaagcaaatcgaatgaaattaactgggtaatgaaacaaagagttcaagaaataagtttttgtttcacagcctataaccagacacatactcatttttcatgataatgaacagaacatagacagaagaaacaaggttttcagtccccacagataactgaaaattatttaaaccgctaaaagaaactttctttctcactaaatcttttataggatttatttaaaatagcaaaagaagaagtttcatcattttttacttcctctctgagtggactggcctcaaagcaagcattcagaagaaaaagaagcaacctcagtaatttagaaatcattttgcaatcccttaatatcctaaacatcattcatttttgttgttgttgttgttgttgagacagagtctcgctctgtcgccaggctagagtgcggtggcgcgatcttgactcactgcaatctccacctcccacaggttcaggcgattcccgtgcctcagcctcctgagtagctgggactacaggcacgcaccaccatgccaggctaatttttttgtattttagcagagacggggtttcaccatgttggccaggatggtctcgatctcctgacctcgtgatccacccgactcggcctcccaaagtgctgggattacaggtgtaagccaccgtgcccagccctaaacatcattcttgagagcattgggatatctcctgaaaaggtttatgaaaaagaagaatctcatctcagtgaagaatacttctcattttttaaaaaagcttaaaactttgaagttagctttaacttaaatagtatttcccatttatcgcagaccttttttaggaagcaagcttaatggctgataattttaaattctctctcttgcaggaaggactatgaaaagctagaattgagtgtttaaagttcaacatgttatttgtaatagatgtttgatagattttctgctactttgctgctatggttttctccaagagctacataatttagtttcatataaagtatcatcagtgtagaacctaattcaattcaaagctgtgtgtttggaagactatcttactatttcacaacagcctgacaacatttctatagccaaaaatagctaaatacctcaatcagtctcagaatgtcattttggtactttggtggccacataagccattattcactagtatgactagttgtgtctggcagtttatatttaactctctttatgtctgtggattttttccttcaaagtttaataaatttattttcttggattcctgatagtgtgcttctgttatcaaacaccaacataaaaatgatctaaacca

SEQ ID NO: 13 - DNA, 4698 bp, homo sapien
gatatgtgtgtgtgtgcatgagagagagagattgagaatgactgatttgggagggattttgtgaaggtttatatatcaaagcagaaagaccaagaatttagagattaatacatgccaagtggtaaccaagaaacttctgtgggatcccacctccaacccctccctctctgtcagattttaaccaaatcagtgtgatgtgatctgcttgcatatatgagtgaaagaaaaaggaaatttaaaaagttcttgatataaagcctggaggaaacaatacgaaaatccagcctctatttcagcaatatctgccggactattggtcctacaggtatggatctctggcagctgctgttgaccttggcactggcaggatcaagtgatgctttttctggaagtgaggccacagcagctatccttagcagagcaccctggagtctgcaaagtgttaatccaggcctaaagacaaattcttctaaggagcctaaattcaccaagtgccgttcacctgagcgagagactttttcatgccactggacagatgaggttcatcatggtacaaagaacctaggacccatacagctgttctataccagaaggaacactcaagaatggactcaagaatggaaagaatgccctgattatgtttctgctggggaaaacagctgttactttaattcatcgtttacctccatctggataccttattgtatcaagctaactagcaatggtggtacagtggatgaaaagtgtttctctgttgatgaaatagtgcaaccagatccacccattgccctcaactggactttactgaacgtcagtttaactgggattcatgcagatatccaagtgagatgggaagcaccacgcaatgcagatattcagaaaggatggatggttctggagtatgaacttcaatacaaagaagtaaatgaaactaaatggaaaatgatggaccctatattgacaacatcagttccagtgtactcattgaaagtggataaggaatatgaagtgcgtgtgagatccaaacaacgaaactctggaaattatggcgagttcagtgaggtgctctatgtaacacttcctcagatgagccaatttacatgtgaagaagatttctactttccatggctcttaattattatctttggaatatttgggctaacagtgatgctatttgtattcttattttctaaacagcaaaggattaaaatgctgattctgcccccagttccagttccaaagattaaaggaatcgatccagatctcctcaaggaaggaaaattagaggaggtgaacacaatcttagccattcatgatagctataaacccgaattccacagtgatgactcttgggttgaatttattgagctagatattgatgagccagatgaaaagactgaggaatcagacacagacagacttctaagcagtgaccatgagaaatcacatagtaacctaggggtgaaggatggcgactctggacgtaccagctgttgtgaacctgacattctggagactgatttcaatgccaatgacatacatgagggtacctcagaggttgctcagccacagaggttaaaaggggaagcagatctcttatgccttgaccagaagaatcaaaataactcaccttatcatgatgcttgccctgctactcagcagcccagtgttatccaagcagagaaaaacaaaccacaaccacttcctactgaaggagctgagtcaactcaccaagctgcccatattcagctaagcaatccaagttcactgtcaaacatcgacttttatgcccaggtgagcgacattacaccagcaggtagtgtggtcctttccccgggccaaaagaataaggcagggatgtcccaatgtgacatgcacccggaaatggtctcactctgccaagaaaacttccttatggacaatgcctacttctgtgaggcagatgccaaaaagtgcatccctgtggctcctcacatcaaggttgaatcacacatacagccaagcttaaaccaagaggacatttacatcaccacagaaagccttaccactgctgctgggaggcctgggacaggagaacatgttccaggttctgagatgcctgtcccagactatacctccattcatatagtacagtccccacagggcctcatactcaatgcgactgccttgcccttgcctgacaaagagtttctctcatcatgtggctatgtgagcacagaccaactgaacaaaatcatgccttagcctttctttggtttcccaagagctacgtatttaatagcaaagaattgactggggcaataacgtttaagccaaaacaatgtttaaaccttttttgggggagtgacaggatggggtatggattctaaaatgccttttcccaaaatgttgaaatatgatgttaaaaaaataagaagaatgcttaatcagatagatattcctattgtgcaatgtaaatattttaaagaattgtgtcagactgtttagtagcagtgattgtcttaatattgtgggtgttaatttttgatactaagcattgaatggctatgtttttaatgtatagtaaatcacgctttttgaaaaagcgaaaaaatcaggtggcttttgcggttcaggaaaattgaatgcaaaccatagcacaggctaattttttgttgtttcttaaataagaaacttttttatttaaaaaactaaaaactagaggtgagaaatttaaactataagcaagaaggcaaaaatagtttggatatgtaaaacatttattttgacataaagttgataaagattttttaataatttagacttcaagcatggctattttatattacactacacactgtgtactgcagttggtatgacccctctaaggagtgtagcaactacagtctaaagctggtttaatgttttggccaatgcacctaaagaaaaacaaactcgttttttacaaagcccttttatacctccccagactccttcaacaattctaaaatgattgtagtaatctgcattattggaatataattgttttatctgaatttttaaacaagtatttgttaatttagaaaactttaaagcgtttgcacagatcaacttaccaggcaccaaaagaagtaaaagcaaaaaagaaaacctttcttcaccaaatcttggttgatgccaaaaaaaaatacatgctaagagaagtagaaatcatagctggttcacactgaccaagatacttaagtgctgcaattgcacgcggagtgagttttttagtgcgtgcagatggtgagagataagatctatagcctctgcagcggaatctgttcacacccaacttggttttgctacataattatccaggaagggaataaggtacaagaagcattttgtaagttgaagcaaatcgaatgaaattaactgggtaatgaaacaaagagttcaagaaataagtttttgtttcacagcctataaccagacacatactcatttttcatgataatgaacagaacatagacagaagaaacaaggttttcagtccccacagataactgaaaattatttaaaccgctaaaagaaactttctttctcactaaatcttttataggatttatttaaaatagcaaaagaagaagtttcatcattttttacttcctctctgagtggactggcctcaaagcaagcattcagaagaaaaagaagcaacctcagtaatttagaaatcattttgcaatcccttaatatcctaaacatcattcatttttgttgttgttgttgttgttgagacagagtctcgctctgtcgccaggctagagtgcggtggcgcgatcttgactcactgcaatctccacctcccacaggttcaggcgattcccgtgcctcagcctcctgagtagctgggactacaggcacgcaccaccatgccaggctaatttttttgtattttagcagagacggggtttcaccatgttggccaggatggtctcgatctcctgacctcgtgatccacccgactcggcctcccaaagtgctgggattacaggtgtaagccaccgtgcccagccctaaacatcattcttgagagcattgggatatctcctgaaaaggtttatgaaaaagaagaatctcatctcagtgaagaatacttctcattttttaaaaaagcttaaaactttgaagttagctttaacttaaatagtatttcccatttatcgcagaccttttttaggaagcaagcttaatggctgataattttaaattctctctcttgcaggaaggactatgaaaagctagaattgagtgtttaaagttcaacatgttatttgtaatagatgtttgatagattttctgctactttgctgctatggttttctccaagagctacataatttagtttcatataaagtatcatcagtgtagaacctaattcaattcaaagctgtgtgtttggaagactatcttactatttcacaacagcctgacaacatttctatagccaaaaatagctaaatacctcaatcagtctcagaatgtcattttggtactttggtggccacataagccattattcactagtatgactagttgtgtctggcagtttatatttaactctctttatgtctgtggattttttccttcaaagtttaataaatttattttcttggattcctgatagtgtgcttctgttatcaaacaccaacataaaaatgatctaaacca

SEQ ID NO: 14 - DNA, 4524 bp, homo sapien
ggggaatgagtagcaaagatggattaagtgagaagagtataggaggcagcagggccagaggtgtgaatagcccagaaccttctgagaagattcctttgtggacggaagaaaggggaggtttgtggaaatggtggaagataaggtcctacaggtatggatctctggcagctgctgttgaccttggcactggcaggatcaagtgatgctttttctggaagtgaggccacagcagctatccttagcagagcaccctggagtctgcaaagtgttaatccaggcctaaagacaaattcttctaaggagcctaaattcaccaagtgccgttcacctgagcgagagactttttcatgccactggacagatgaggttcatcatggtacaaagaacctaggacccatacagctgttctataccagaaggaacactcaagaatggactcaagaatggaaagaatgccctgattatgtttctgctggggaaaacagctgttactttaattcatcgtttacctccatctggataccttattgtatcaagctaactagcaatggtggtacagtggatgaaaagtgtttctctgttgatgaaatagtgcaaccagatccacccattgccctcaactggactttactgaacgtcagtttaactgggattcatgcagatatccaagtgagatgggaagcaccacgcaatgcagatattcagaaaggatggatggttctggagtatgaacttcaatacaaagaagtaaatgaaactaaatggaaaatgatggaccctatattgacaacatcagttccagtgtactcattgaaagtggataaggaatatgaagtgcgtgtgagatccaaacaacgaaactctggaaattatggcgagttcagtgaggtgctctatgtaacacttcctcagatgagccaatttacatgtgaagaagatttctactttccatggctcttaattattatctttggaatatttgggctaacagtgatgctatttgtattcttattttctaaacagcaaaggattaaaatgctgattctgcccccagttccagttccaaagattaaaggaatcgatccagatctcctcaaggaaggaaaattagaggaggtgaacacaatcttagccattcatgatagctataaacccgaattccacagtgatgactcttgggttgaatttattgagctagatattgatgagccagatgaaaagactgaggaatcagacacagacagacttctaagcagtgaccatgagaaatcacatagtaacctaggggtgaaggatggcgactctggacgtaccagctgttgtgaacctgacattctggagactgatttcaatgccaatgacatacatgagggtacctcagaggttgctcagccacagaggttaaaaggggaagcagatctcttatgccttgaccagaagaatcaaaataactcaccttatcatgatgcttgccctgctactcagcagcccagtgttatccaagcagagaaaaacaaaccacaaccacttcctactgaaggagctgagtcaactcaccaagctgcccatattcagctaagcaatccaagttcactgtcaaacatcgacttttatgcccaggtgagcgacattacaccagcaggtagtgtggtcctttccccgggccaaaagaataaggcagggatgtcccaatgtgacatgcacccggaaatggtctcactctgccaagaaaacttccttatggacaatgcctacttctgtgaggcagatgccaaaaagtgcatccctgtggctcctcacatcaaggttgaatcacacatacagccaagcttaaaccaagaggacatttacatcaccacagaaagccttaccactgctgctgggaggcctgggacaggagaacatgttccaggttctgagatgcctgtcccagactatacctccattcatatagtacagtccccacagggcctcatactcaatgcgactgccttgcccttgcctgacaaagagtttctctcatcatgtggctatgtgagcacagaccaactgaacaaaatcatgccttagcctttctttggtttcccaagagctacgtatttaatagcaaagaattgactggggcaataacgtttaagccaaaacaatgtttaaaccttttttgggggagtgacaggatggggtatggattctaaaatgccttttcccaaaatgttgaaatatgatgttaaaaaaataagaagaatgcttaatcagatagatattcctattgtgcaatgtaaatattttaaagaattgtgtcagactgtttagtagcagtgattgtcttaatattgtgggtgttaatttttgatactaagcattgaatggctatgtttttaatgtatagtaaatcacgctttttgaaaaagcgaaaaaatcaggtggcttttgcggttcaggaaaattgaatgcaaaccatagcacaggctaattttttgttgtttcttaaataagaaacttttttatttaaaaaactaaaaactagaggtgagaaatttaaactataagcaagaaggcaaaaatagtttggatatgtaaaacatttattttgacataaagttgataaagattttttaataatttagacttcaagcatggctattttatattacactacacactgtgtactgcagttggtatgacccctctaaggagtgtagcaactacagtctaaagctggtttaatgttttggccaatgcacctaaagaaaaacaaactcgttttttacaaagcccttttatacctccccagactccttcaacaattctaaaatgattgtagtaatctgcattattggaatataattgttttatctgaatttttaaacaagtatttgttaatttagaaaactttaaagcgtttgcacagatcaacttaccaggcaccaaaagaagtaaaagcaaaaaagaaaacctttcttcaccaaatcttggttgatgccaaaaaaaaatacatgctaagagaagtagaaatcatagctggttcacactgaccaagatacttaagtgctgcaattgcacgcggagtgagttttttagtgcgtgcagatggtgagagataagatctatagcctctgcagcggaatctgttcacacccaacttggttttgctacataattatccaggaagggaataaggtacaagaagcattttgtaagttgaagcaaatcgaatgaaattaactgggtaatgaaacaaagagttcaagaaataagtttttgtttcacagcctataaccagacacatactcatttttcatgataatgaacagaacatagacagaagaaacaaggttttcagtccccacagataactgaaaattatttaaaccgctaaaagaaactttctttctcactaaatcttttataggatttatttaaaatagcaaaagaagaagtttcatcattttttacttcctctctgagtggactggcctcaaagcaagcattcagaagaaaaagaagcaacctcagtaatttagaaatcattttgcaatcccttaatatcctaaacatcattcatttttgttgttgttgttgttgttgagacagagtctcgctctgtcgccaggctagagtgcggtggcgcgatcttgactcactgcaatctccacctcccacaggttcaggcgattcccgtgcctcagcctcctgagtagctgggactacaggcacgcaccaccatgccaggctaatttttttgtattttagcagagacggggtttcaccatgttggccaggatggtctcgatctcctgacctcgtgatccacccgactcggcctcccaaagtgctgggattacaggtgtaagccaccgtgcccagccctaaacatcattcttgagagcattgggatatctcctgaaaaggtttatgaaaaagaagaatctcatctcagtgaagaatacttctcattttttaaaaaagcttaaaactttgaagttagctttaacttaaatagtatttcccatttatcgcagaccttttttaggaagcaagcttaatggctgataattttaaattctctctcttgcaggaaggactatgaaaagctagaattgagtgtttaaagttcaacatgttatttgtaatagatgtttgatagattttctgctactttgctgctatggttttctccaagagctacataatttagtttcatataaagtatcatcagtgtagaacctaattcaattcaaagctgtgtgtttggaagactatcttactatttcacaacagcctgacaacatttctatagccaaaaatagctaaatacctcaatcagtctcagaatgtcattttggtactttggtggccacataagccattattcactagtatgactagttgtgtctggcagtttatatttaactctctttatgtctgtggattttttccttcaaagtttaataaatttattttcttggattcctgatagtgtgcttctgttatcaaacaccaacataaaaatgatctaaacca

SEQ ID NO: 15 - DNA, 4419 bp, homo sapien
caatgatattagctatgacagcacgtatgagcctggggtcctacaggtatggatctctggcagctgctgttgaccttggcactggcaggatcaagtgatgctttttctggaagtgaggccacagcagctatccttagcagagcaccctggagtctgcaaagtgttaatccaggcctaaagacaaattcttctaaggagcctaaattcaccaagtgccgttcacctgagcgagagactttttcatgccactggacagatgaggttcatcatggtacaaagaacctaggacccatacagctgttctataccagaaggaacactcaagaatggactcaagaatggaaagaatgccctgattatgtttctgctggggaaaacagctgttactttaattcatcgtttacctccatctggataccttattgtatcaagctaactagcaatggtggtacagtggatgaaaagtgtttctctgttgatgaaatagtgcaaccagatccacccattgccctcaactggactttactgaacgtcagtttaactgggattcatgcagatatccaagtgagatgggaagcaccacgcaatgcagatattcagaaaggatggatggttctggagtatgaacttcaatacaaagaagtaaatgaaactaaatggaaaatgatggaccctatattgacaacatcagttccagtgtactcattgaaagtggataaggaatatgaagtgcgtgtgagatccaaacaacgaaactctggaaattatggcgagttcagtgaggtgctctatgtaacacttcctcagatgagccaatttacatgtgaagaagatttctactttccatggctcttaattattatctttggaatatttgggctaacagtgatgctatttgtattcttattttctaaacagcaaaggattaaaatgctgattctgcccccagttccagttccaaagattaaaggaatcgatccagatctcctcaaggaaggaaaattagaggaggtgaacacaatcttagccattcatgatagctataaacccgaattccacagtgatgactcttgggttgaatttattgagctagatattgatgagccagatgaaaagactgaggaatcagacacagacagacttctaagcagtgaccatgagaaatcacatagtaacctaggggtgaaggatggcgactctggacgtaccagctgttgtgaacctgacattctggagactgatttcaatgccaatgacatacatgagggtacctcagaggttgctcagccacagaggttaaaaggggaagcagatctcttatgccttgaccagaagaatcaaaataactcaccttatcatgatgcttgccctgctactcagcagcccagtgttatccaagcagagaaaaacaaaccacaaccacttcctactgaaggagctgagtcaactcaccaagctgcccatattcagctaagcaatccaagttcactgtcaaacatcgacttttatgcccaggtgagcgacattacaccagcaggtagtgtggtcctttccccgggccaaaagaataaggcagggatgtcccaatgtgacatgcacccggaaatggtctcactctgccaagaaaacttccttatggacaatgcctacttctgtgaggcagatgccaaaaagtgcatccctgtggctcctcacatcaaggttgaatcacacatacagccaagcttaaaccaagaggacatttacatcaccacagaaagccttaccactgctgctgggaggcctgggacaggagaacatgttccaggttctgagatgcctgtcccagactatacctccattcatatagtacagtccccacagggcctcatactcaatgcgactgccttgcccttgcctgacaaagagtttctctcatcatgtggctatgtgagcacagaccaactgaacaaaatcatgccttagcctttctttggtttcccaagagctacgtatttaatagcaaagaattgactggggcaataacgtttaagccaaaacaatgtttaaaccttttttgggggagtgacaggatggggtatggattctaaaatgccttttcccaaaatgttgaaatatgatgttaaaaaaataagaagaatgcttaatcagatagatattcctattgtgcaatgtaaatattttaaagaattgtgtcagactgtttagtagcagtgattgtcttaatattgtgggtgttaatttttgatactaagcattgaatggctatgtttttaatgtatagtaaatcacgctttttgaaaaagcgaaaaaatcaggtggcttttgcggttcaggaaaattgaatgcaaaccatagcacaggctaattttttgttgtttcttaaataagaaacttttttatttaaaaaactaaaaactagaggtgagaaatttaaactataagcaagaaggcaaaaatagtttggatatgtaaaacatttattttgacataaagttgataaagattttttaataatttagacttcaagcatggctattttatattacactacacactgtgtactgcagttggtatgacccctctaaggagtgtagcaactacagtctaaagctggtttaatgttttggccaatgcacctaaagaaaaacaaactcgttttttacaaagcccttttatacctccccagactccttcaacaattctaaaatgattgtagtaatctgcattattggaatataattgttttatctgaatttttaaacaagtatttgttaatttagaaaactttaaagcgtttgcacagatcaacttaccaggcaccaaaagaagtaaaagcaaaaaagaaaacctttcttcaccaaatcttggttgatgccaaaaaaaaatacatgctaagagaagtagaaatcatagctggttcacactgaccaagatacttaagtgctgcaattgcacgcggagtgagttttttagtgcgtgcagatggtgagagataagatctatagcctctgcagcggaatctgttcacacccaacttggttttgctacataattatccaggaagggaataaggtacaagaagcattttgtaagttgaagcaaatcgaatgaaattaactgggtaatgaaacaaagagttcaagaaataagtttttgtttcacagcctataaccagacacatactcatttttcatgataatgaacagaacatagacagaagaaacaaggttttcagtccccacagataactgaaaattatttaaaccgctaaaagaaactttctttctcactaaatcttttataggatttatttaaaatagcaaaagaagaagtttcatcattttttacttcctctctgagtggactggcctcaaagcaagcattcagaagaaaaagaagcaacctcagtaatttagaaatcattttgcaatcccttaatatcctaaacatcattcatttttgttgttgttgttgttgttgagacagagtctcgctctgtcgccaggctagagtgcggtggcgcgatcttgactcactgcaatctccacctcccacaggttcaggcgattcccgtgcctcagcctcctgagtagctgggactacaggcacgcaccaccatgccaggctaatttttttgtattttagcagagacggggtttcaccatgttggccaggatggtctcgatctcctgacctcgtgatccacccgactcggcctcccaaagtgctgggattacaggtgtaagccaccgtgcccagccctaaacatcattcttgagagcattgggatatctcctgaaaaggtttatgaaaaagaagaatctcatctcagtgaagaatacttctcattttttaaaaaagcttaaaactttgaagttagctttaacttaaatagtatttcccatttatcgcagaccttttttaggaagcaagcttaatggctgataattttaaattctctctcttgcaggaaggactatgaaaagctagaattgagtgtttaaagttcaacatgttatttgtaatagatgtttgatagattttctgctactttgctgctatggttttctccaagagctacataatttagtttcatataaagtatcatcagtgtagaacctaattcaattcaaagctgtgtgtttggaagactatcttactatttcacaacagcctgacaacatttctatagccaaaaatagctaaatacctcaatcagtctcagaatgtcattttggtactttggtggccacataagccattattcactagtatgactagttgtgtctggcagtttatatttaactctctttatgtctgtggattttttccttcaaagtttaataaatttattttcttggattcctgatagtgtgcttctgttatcaaacaccaacataaaaatgatctaaacca

SEQ ID NO: 16 - DNA, 4785 bp, homo sapien
cctgtccagctcaaggccccatgctttctgatactgctgataaggttttctatttccagatcaaattaaagcaaaccttactggccctgttactgaagctgtgcatgggggtcgtttgctgtgaggtgtttctatggctttgagccagggtatgaacatctctagtgttcatgttatttcctgagactagcactcacgggaagtagaatttattacaacctgctgtttgagttcatgaaaagtaggacaatatgagactctggggcagtgaaagacttaccaggattccttctggaactgactcgtcagctcattcatgtcttacccagtctttaaacagtatttcatgataatggtctgcttttaattgctgggctttaccttaccctttttgtgattgcaggtcctacaggtatggatctctggcagctgctgttgaccttggcactggcaggatcaagtgatgctttttctggaagtgaggccacagcagctatccttagcagagcaccctggagtctgcaaagtgttaatccaggcctaaagacaaattcttctaaggagcctaaattcaccaagtgccgttcacctgagcgagagactttttcatgccactggacagatgaggttcatcatggtacaaagaacctaggacccatacagctgttctataccagaaggaacactcaagaatggactcaagaatggaaagaatgccctgattatgtttctgctggggaaaacagctgttactttaattcatcgtttacctccatctggataccttattgtatcaagctaactagcaatggtggtacagtggatgaaaagtgtttctctgttgatgaaatagtgcaaccagatccacccattgccctcaactggactttactgaacgtcagtttaactgggattcatgcagatatccaagtgagatgggaagcaccacgcaatgcagatattcagaaaggatggatggttctggagtatgaacttcaatacaaagaagtaaatgaaactaaatggaaaatgatggaccctatattgacaacatcagttccagtgtactcattgaaagtggataaggaatatgaagtgcgtgtgagatccaaacaacgaaactctggaaattatggcgagttcagtgaggtgctctatgtaacacttcctcagatgagccaatttacatgtgaagaagatttctactttccatggctcttaattattatctttggaatatttgggctaacagtgatgctatttgtattcttattttctaaacagcaaaggattaaaatgctgattctgcccccagttccagttccaaagattaaaggaatcgatccagatctcctcaaggaaggaaaattagaggaggtgaacacaatcttagccattcatgatagctataaacccgaattccacagtgatgactcttgggttgaatttattgagctagatattgatgagccagatgaaaagactgaggaatcagacacagacagacttctaagcagtgaccatgagaaatcacatagtaacctaggggtgaaggatggcgactctggacgtaccagctgttgtgaacctgacattctggagactgatttcaatgccaatgacatacatgagggtacctcagaggttgctcagccacagaggttaaaaggggaagcagatctcttatgccttgaccagaagaatcaaaataactcaccttatcatgatgcttgccctgctactcagcagcccagtgttatccaagcagagaaaaacaaaccacaaccacttcctactgaaggagctgagtcaactcaccaagctgcccatattcagctaagcaatccaagttcactgtcaaacatcgacttttatgcccaggtgagcgacattacaccagcaggtagtgtggtcctttccccgggccaaaagaataaggcagggatgtcccaatgtgacatgcacccggaaatggtctcactctgccaagaaaacttccttatggacaatgcctacttctgtgaggcagatgccaaaaagtgcatccctgtggctcctcacatcaaggttgaatcacacatacagccaagcttaaaccaagaggacatttacatcaccacagaaagccttaccactgctgctgggaggcctgggacaggagaacatgttccaggttctgagatgcctgtcccagactatacctccattcatatagtacagtccccacagggcctcatactcaatgcgactgccttgcccttgcctgacaaagagtttctctcatcatgtggctatgtgagcacagaccaactgaacaaaatcatgccttagcctttctttggtttcccaagagctacgtatttaatagcaaagaattgactggggcaataacgtttaagccaaaacaatgtttaaaccttttttgggggagtgacaggatggggtatggattctaaaatgccttttcccaaaatgttgaaatatgatgttaaaaaaataagaagaatgcttaatcagatagatattcctattgtgcaatgtaaatattttaaagaattgtgtcagactgtttagtagcagtgattgtcttaatattgtgggtgttaatttttgatactaagcattgaatggctatgtttttaatgtatagtaaatcacgctttttgaaaaagcgaaaaaatcaggtggcttttgcggttcaggaaaattgaatgcaaaccatagcacaggctaattttttgttgtttcttaaataagaaacttttttatttaaaaaactaaaaactagaggtgagaaatttaaactataagcaagaaggcaaaaatagtttggatatgtaaaacatttattttgacataaagttgataaagattttttaataatttagacttcaagcatggctattttatattacactacacactgtgtactgcagttggtatgacccctctaaggagtgtagcaactacagtctaaagctggtttaatgttttggccaatgcacctaaagaaaaacaaactcgttttttacaaagcccttttatacctccccagactccttcaacaattctaaaatgattgtagtaatctgcattattggaatataattgttttatctgaatttttaaacaagtatttgttaatttagaaaactttaaagcgtttgcacagatcaacttaccaggcaccaaaagaagtaaaagcaaaaaagaaaacctttcttcaccaaatcttggttgatgccaaaaaaaaatacatgctaagagaagtagaaatcatagctggttcacactgaccaagatacttaagtgctgcaattgcacgcggagtgagttttttagtgcgtgcagatggtgagagataagatctatagcctctgcagcggaatctgttcacacccaacttggttttgctacataattatccaggaagggaataaggtacaagaagcattttgtaagttgaagcaaatcgaatgaaattaactgggtaatgaaacaaagagttcaagaaataagtttttgtttcacagcctataaccagacacatactcatttttcatgataatgaacagaacatagacagaagaaacaaggttttcagtccccacagataactgaaaattatttaaaccgctaaaagaaactttctttctcactaaatcttttataggatttatttaaaatagcaaaagaagaagtttcatcattttttacttcctctctgagtggactggcctcaaagcaagcattcagaagaaaaagaagcaacctcagtaatttagaaatcattttgcaatcccttaatatcctaaacatcattcatttttgttgttgttgttgttgttgagacagagtctcgctctgtcgccaggctagagtgcggtggcgcgatcttgactcactgcaatctccacctcccacaggttcaggcgattcccgtgcctcagcctcctgagtagctgggactacaggcacgcaccaccatgccaggctaatttttttgtattttagcagagacggggtttcaccatgttggccaggatggtctcgatctcctgacctcgtgatccacccgactcggcctcccaaagtgctgggattacaggtgtaagccaccgtgcccagccctaaacatcattcttgagagcattgggatatctcctgaaaaggtttatgaaaaagaagaatctcatctcagtgaagaatacttctcattttttaaaaaagcttaaaactttgaagttagctttaacttaaatagtatttcccatttatcgcagaccttttttaggaagcaagcttaatggctgataattttaaattctctctcttgcaggaaggactatgaaaagctagaattgagtgtttaaagttcaacatgttatttgtaatagatgtttgatagattttctgctactttgctgctatggttttctccaagagctacataatttagtttcatataaagtatcatcagtgtagaacctaattcaattcaaagctgtgtgtttggaagactatcttactatttcacaacagcctgacaacatttctatagccaaaaatagctaaatacctcaatcagtctcagaatgtcattttggtactttggtggccacataagccattattcactagtatgactagttgtgtctggcagtttatatttaactctctttatgtctgtggattttttccttcaaagtttaataaatttattttcttggattcctgatagtgtgcttctgttatcaaacaccaacataaaaatgatctaaacca

SEQ ID NO: 17 - DNA, 4316 bp, homo sapien
gtcctacaggtatggatctctggcagctgctgttgaccttggcactggcaggatcaagtgatgctttttctggaagtgaggattcttctaaggagcctaaattcaccaagtgccgttcacctgagcgagagactttttcatgccactggacagatgaggttcatcatggtacaaagaacctaggacccatacagctgttctataccagaaggaacactcaagaatggactcaagaatggaaagaatgccctgattatgtttctgctggggaaaacagctgttactttaattcatcgtttacctccatctggataccttattgtatcaagctaactagcaatggtggtacagtggatgaaaagtgtttctctgttgatgaaatagtgcaaccagatccacccattgccctcaactggactttactgaacgtcagtttaactgggattcatgcagatatccaagtgagatgggaagcaccacgcaatgcagatattcagaaaggatggatggttctggagtatgaacttcaatacaaagaagtaaatgaaactaaatggaaaatgatggaccctatattgacaacatcagttccagtgtactcattgaaagtggataaggaatatgaagtgcgtgtgagatccaaacaacgaaactctggaaattatggcgagttcagtgaggtgctctatgtaacacttcctcagatgagccaatttacatgtgaagaagatttctactttccatggctcttaattattatctttggaatatttgggctaacagtgatgctatttgtattcttattttctaaacagcaaaggattaaaatgctgattctgcccccagttccagttccaaagattaaaggaatcgatccagatctcctcaaggaaggaaaattagaggaggtgaacacaatcttagccattcatgatagctataaacccgaattccacagtgatgactcttgggttgaatttattgagctagatattgatgagccagatgaaaagactgaggaatcagacacagacagacttctaagcagtgaccatgagaaatcacatagtaacctaggggtgaaggatggcgactctggacgtaccagctgttgtgaacctgacattctggagactgatttcaatgccaatgacatacatgagggtacctcagaggttgctcagccacagaggttaaaaggggaagcagatctcttatgccttgaccagaagaatcaaaataactcaccttatcatgatgcttgccctgctactcagcagcccagtgttatccaagcagagaaaaacaaaccacaaccacttcctactgaaggagctgagtcaactcaccaagctgcccatattcagctaagcaatccaagttcactgtcaaacatcgacttttatgcccaggtgagcgacattacaccagcaggtagtgtggtcctttccccgggccaaaagaataaggcagggatgtcccaatgtgacatgcacccggaaatggtctcactctgccaagaaaacttccttatggacaatgcctacttctgtgaggcagatgccaaaaagtgcatccctgtggctcctcacatcaaggttgaatcacacatacagccaagcttaaaccaagaggacatttacatcaccacagaaagccttaccactgctgctgggaggcctgggacaggagaacatgttccaggttctgagatgcctgtcccagactatacctccattcatatagtacagtccccacagggcctcatactcaatgcgactgccttgcccttgcctgacaaagagtttctctcatcatgtggctatgtgagcacagaccaactgaacaaaatcatgccttagcctttctttggtttcccaagagctacgtatttaatagcaaagaattgactggggcaataacgtttaagccaaaacaatgtttaaaccttttttgggggagtgacaggatggggtatggattctaaaatgccttttcccaaaatgttgaaatatgatgttaaaaaaataagaagaatgcttaatcagatagatattcctattgtgcaatgtaaatattttaaagaattgtgtcagactgtttagtagcagtgattgtcttaatattgtgggtgttaatttttgatactaagcattgaatggctatgtttttaatgtatagtaaatcacgctttttgaaaaagcgaaaaaatcaggtggcttttgcggttcaggaaaattgaatgcaaaccatagcacaggctaattttttgttgtttcttaaataagaaacttttttatttaaaaaactaaaaactagaggtgagaaatttaaactataagcaagaaggcaaaaatagtttggatatgtaaaacatttattttgacataaagttgataaagattttttaataatttagacttcaagcatggctattttatattacactacacactgtgtactgcagttggtatgacccctctaaggagtgtagcaactacagtctaaagctggtttaatgttttggccaatgcacctaaagaaaaacaaactcgttttttacaaagcccttttatacctccccagactccttcaacaattctaaaatgattgtagtaatctgcattattggaatataattgttttatctgaatttttaaacaagtatttgttaatttagaaaactttaaagcgtttgcacagatcaacttaccaggcaccaaaagaagtaaaagcaaaaaagaaaacctttcttcaccaaatcttggttgatgccaaaaaaaaatacatgctaagagaagtagaaatcatagctggttcacactgaccaagatacttaagtgctgcaattgcacgcggagtgagttttttagtgcgtgcagatggtgagagataagatctatagcctctgcagcggaatctgttcacacccaacttggttttgctacataattatccaggaagggaataaggtacaagaagcattttgtaagttgaagcaaatcgaatgaaattaactgggtaatgaaacaaagagttcaagaaataagtttttgtttcacagcctataaccagacacatactcatttttcatgataatgaacagaacatagacagaagaaacaaggttttcagtccccacagataactgaaaattatttaaaccgctaaaagaaactttctttctcactaaatcttttataggatttatttaaaatagcaaaagaagaagtttcatcattttttacttcctctctgagtggactggcctcaaagcaagcattcagaagaaaaagaagcaacctcagtaatttagaaatcattttgcaatcccttaatatcctaaacatcattcatttttgttgttgttgttgttgttgagacagagtctcgctctgtcgccaggctagagtgcggtggcgcgatcttgactcactgcaatctccacctcccacaggttcaggcgattcccgtgcctcagcctcctgagtagctgggactacaggcacgcaccaccatgccaggctaatttttttgtattttagcagagacggggtttcaccatgttggccaggatggtctcgatctcctgacctcgtgatccacccgactcggcctcccaaagtgctgggattacaggtgtaagccaccgtgcccagccctaaacatcattcttgagagcattgggatatctcctgaaaaggtttatgaaaaagaagaatctcatctcagtgaagaatacttctcattttttaaaaaagcttaaaactttgaagttagctttaacttaaatagtatttcccatttatcgcagaccttttttaggaagcaagcttaatggctgataattttaaattctctctcttgcaggaaggactatgaaaagctagaattgagtgtttaaagttcaacatgttatttgtaatagatgtttgatagattttctgctactttgctgctatggttttctccaagagctacataatttagtttcatataaagtatcatcagtgtagaacctaattcaattcaaagctgtgtgtttggaagactatcttactatttcacaacagcctgacaacatttctatagccaaaaatagctaaatacctcaatcagtctcagaatgtcattttggtactttggtggccacataagccattattcactagtatgactagttgtgtctggcagtttatatttaactctctttatgtctgtggattttttccttcaaagtttaataaatttattttcttggattcctgatagtgtgcttctgttatcaaacaccaacataaaaatgatctaaacca

SEQ ID NO: 18 - DNA, 4356 bp, homo sapien
gtcctacaggtatggatctctggcagctgctgttgaccttggcactggcaggatcaagtgatgctttttctggaagtgaggccacagcagctatccttagcagagcaccctggagtctgcaaagtgttaatccaggcctaaagacaaattcttctaaggagcctaaattcaccaagtgccgttcacctgagcgagagactttttcatgccactggacagatgaggttcatcatggtacaaagaacctaggacccatacagctgttctataccagaaggaacactcaagaatggactcaagaatggaaagaatgccctgattatgtttctgctggggaaaacagctgttactttaattcatcgtttacctccatctggataccttattgtatcaagctaactagcaatggtggtacagtggatgaaaagtgtttctctgttgatgaaatagtgcaaccagatccacccattgccctcaactggactttactgaacgtcagtttaactgggattcatgcagatatccaagtgagatgggaagcaccacgcaatgcagatattcagaaaggatggatggttctggagtatgaacttcaatacaaagaagtaaatgaaactaaatggaaaatgatggaccctatattgacaacatcagttccagtgtactcattgaaagtggataaggaatatgaagtgcgtgtgagatccaaacaacgaaactctggaaattatggcgagttcagtgaggtgctctatgtaacacttcctcagatgagccaatttacatgtgaagaagatttctactttccatggctcttaattattatctttggaatatttgggctaacagtgatgctatttgtattcttattttctaaacagcaaagttccagttccaaagattaaaggaatcgatccagatctcctcaaggaaggaaaattagaggaggtgaacacaatcttagccattcatgatagctataaacccgaattccacagtgatgactcttgggttgaatttattgagctagatattgatgagccagatgaaaagactgaggaatcagacacagacagacttctaagcagtgaccatgagaaatcacatagtaacctaggggtgaaggatggcgactctggacgtaccagctgttgtgaacctgacattctggagactgatttcaatgccaatgacatacatgagggtacctcagaggttgctcagccacagaggttaaaaggggaagcagatctcttatgccttgaccagaagaatcaaaataactcaccttatcatgatgcttgccctgctactcagcagcccagtgttatccaagcagagaaaaacaaaccacaaccacttcctactgaaggagctgagtcaactcaccaagctgcccatattcagctaagcaatccaagttcactgtcaaacatcgacttttatgcccaggtgagcgacattacaccagcaggtagtgtggtcctttccccgggccaaaagaataaggcagggatgtcccaatgtgacatgcacccggaaatggtctcactctgccaagaaaacttccttatggacaatgcctacttctgtgaggcagatgccaaaaagtgcatccctgtggctcctcacatcaaggttgaatcacacatacagccaagcttaaaccaagaggacatttacatcaccacagaaagccttaccactgctgctgggaggcctgggacaggagaacatgttccaggttctgagatgcctgtcccagactatacctccattcatatagtacagtccccacagggcctcatactcaatgcgactgccttgcccttgcctgacaaagagtttctctcatcatgtggctatgtgagcacagaccaactgaacaaaatcatgccttagcctttctttggtttcccaagagctacgtatttaatagcaaagaattgactggggcaataacgtttaagccaaaacaatgtttaaaccttttttgggggagtgacaggatggggtatggattctaaaatgccttttcccaaaatgttgaaatatgatgttaaaaaaataagaagaatgcttaatcagatagatattcctattgtgcaatgtaaatattttaaagaattgtgtcagactgtttagtagcagtgattgtcttaatattgtgggtgttaatttttgatactaagcattgaatggctatgtttttaatgtatagtaaatcacgctttttgaaaaagcgaaaaaatcaggtggcttttgcggttcaggaaaattgaatgcaaaccatagcacaggctaattttttgttgtttcttaaataagaaacttttttatttaaaaaactaaaaactagaggtgagaaatttaaactataagcaagaaggcaaaaatagtttggatatgtaaaacatttattttgacataaagttgataaagattttttaataatttagacttcaagcatggctattttatattacactacacactgtgtactgcagttggtatgacccctctaaggagtgtagcaactacagtctaaagctggtttaatgttttggccaatgcacctaaagaaaaacaaactcgttttttacaaagcccttttatacctccccagactccttcaacaattctaaaatgattgtagtaatctgcattattggaatataattgttttatctgaatttttaaacaagtatttgttaatttagaaaactttaaagcgtttgcacagatcaacttaccaggcaccaaaagaagtaaaagcaaaaaagaaaacctttcttcaccaaatcttggttgatgccaaaaaaaaatacatgctaagagaagtagaaatcatagctggttcacactgaccaagatacttaagtgctgcaattgcacgcggagtgagttttttagtgcgtgcagatggtgagagataagatctatagcctctgcagcggaatctgttcacacccaacttggttttgctacataattatccaggaagggaataaggtacaagaagcattttgtaagttgaagcaaatcgaatgaaattaactgggtaatgaaacaaagagttcaagaaataagtttttgtttcacagcctataaccagacacatactcatttttcatgataatgaacagaacatagacagaagaaacaaggttttcagtccccacagataactgaaaattatttaaaccgctaaaagaaactttctttctcactaaatcttttataggatttatttaaaatagcaaaagaagaagtttcatcattttttacttcctctctgagtggactggcctcaaagcaagcattcagaagaaaaagaagcaacctcagtaatttagaaatcattttgcaatcccttaatatcctaaacatcattcatttttgttgttgttgttgttgttgagacagagtctcgctctgtcgccaggctagagtgcggtggcgcgatcttgactcactgcaatctccacctcccacaggttcaggcgattcccgtgcctcagcctcctgagtagctgggactacaggcacgcaccaccatgccaggctaatttttttgtattttagcagagacggggtttcaccatgttggccaggatggtctcgatctcctgacctcgtgatccacccgactcggcctcccaaagtgctgggattacaggtgtaagccaccgtgcccagccctaaacatcattcttgagagcattgggatatctcctgaaaaggtttatgaaaaagaagaatctcatctcagtgaagaatacttctcattttttaaaaaagcttaaaactttgaagttagctttaacttaaatagtatttcccatttatcgcagaccttttttaggaagcaagcttaatggctgataattttaaattctctctcttgcaggaaggactatgaaaagctagaattgagtgtttaaagttcaacatgttatttgtaatagatgtttgatagattttctgctactttgctgctatggttttctccaagagctacataatttagtttcatataaagtatcatcagtgtagaacctaattcaattcaaagctgtgtgtttggaagactatcttactatttcacaacagcctgacaacatttctatagccaaaaatagctaaatacctcaatcagtctcagaatgtcattttggtactttggtggccacataagccattattcactagtatgactagttgtgtctggcagtttatatttaactctctttatgtctgtggattttttccttcaaagtttaataaatttattttcttggattcctgatagtgtgcttctgttatcaaacaccaacataaaaatgatctaaacca

SEQ ID NO: 19 - DNA, 4312 bp, homo sapien
gtcctacaggtatggatctctggcagctgctgttgaccttggcactggcaggatcaagtgatgctttttctggaagtgaggccacagcagctatccttagcagagcaccctggagtctgcaaagtgttaatccaggcctaaagacaaattcttctaaggagcctaaattcaccaagtgccgttcacctgagcgagagactttttcatgccactggacagatgaggttcatcatggtacaaagaacctaggacccatacagctgttctataccagaaggaacactcaagaatggactcaagaatggaaagaatgccctgattatgtttctgctggggaaaacagctgttactttaattcatcgtttacctccatctggataccttattgtatcaagctaactagcaatggtggtacagtggatgaaaagtgtttctctgttgatgaaatagtgcaaccagatccacccattgccctcaactggactttactgaacgtcagtttaactgggattcatgcagatatccaagtgagatgggaagcaccacgcaatgcagatattcagaaaggatggatggttctggagtatgaacttcaatacaaagaagtaaatgaaactaaatggaaaatgatggaccctatattgacaacatcagttccagtgtactcattgaaagtggataaggaatatgaagtgcgtgtgagatccaaacaacgaaactctggaaattatggcgagttcagtgaggtgctctatgtaacacttcctcagatgagccaatttacatgtgaagaagatttctactttccatggctcttaattattatctttggaatatttgggctaacagtgatgctatttgtattcttattttctaaacagcaaaggaaggaaaattagaggaggtgaacacaatcttagccattcatgatagctataaacccgaattccacagtgatgactcttgggttgaatttattgagctagatattgatgagccagatgaaaagactgaggaatcagacacagacagacttctaagcagtgaccatgagaaatcacatagtaacctaggggtgaaggatggcgactctggacgtaccagctgttgtgaacctgacattctggagactgatttcaatgccaatgacatacatgagggtacctcagaggttgctcagccacagaggttaaaaggggaagcagatctcttatgccttgaccagaagaatcaaaataactcaccttatcatgatgcttgccctgctactcagcagcccagtgttatccaagcagagaaaaacaaaccacaaccacttcctactgaaggagctgagtcaactcaccaagctgcccatattcagctaagcaatccaagttcactgtcaaacatcgacttttatgcccaggtgagcgacattacaccagcaggtagtgtggtcctttccccgggccaaaagaataaggcagggatgtcccaatgtgacatgcacccggaaatggtctcactctgccaagaaaacttccttatggacaatgcctacttctgtgaggcagatgccaaaaagtgcatccctgtggctcctcacatcaaggttgaatcacacatacagccaagcttaaaccaagaggacatttacatcaccacagaaagccttaccactgctgctgggaggcctgggacaggagaacatgttccaggttctgagatgcctgtcccagactatacctccattcatatagtacagtccccacagggcctcatactcaatgcgactgccttgcccttgcctgacaaagagtttctctcatcatgtggctatgtgagcacagaccaactgaacaaaatcatgccttagcctttctttggtttcccaagagctacgtatttaatagcaaagaattgactggggcaataacgtttaagccaaaacaatgtttaaaccttttttgggggagtgacaggatggggtatggattctaaaatgccttttcccaaaatgttgaaatatgatgttaaaaaaataagaagaatgcttaatcagatagatattcctattgtgcaatgtaaatattttaaagaattgtgtcagactgtttagtagcagtgattgtcttaatattgtgggtgttaatttttgatactaagcattgaatggctatgtttttaatgtatagtaaatcacgctttttgaaaaagcgaaaaaatcaggtggcttttgcggttcaggaaaattgaatgcaaaccatagcacaggctaattttttgttgtttcttaaataagaaacttttttatttaaaaaactaaaaactagaggtgagaaatttaaactataagcaagaaggcaaaaatagtttggatatgtaaaacatttattttgacataaagttgataaagattttttaataatttagacttcaagcatggctattttatattacactacacactgtgtactgcagttggtatgacccctctaaggagtgtagcaactacagtctaaagctggtttaatgttttggccaatgcacctaaagaaaaacaaactcgttttttacaaagcccttttatacctccccagactccttcaacaattctaaaatgattgtagtaatctgcattattggaatataattgttttatctgaatttttaaacaagtatttgttaatttagaaaactttaaagcgtttgcacagatcaacttaccaggcaccaaaagaagtaaaagcaaaaaagaaaacctttcttcaccaaatcttggttgatgccaaaaaaaaatacatgctaagagaagtagaaatcatagctggttcacactgaccaagatacttaagtgctgcaattgcacgcggagtgagttttttagtgcgtgcagatggtgagagataagatctatagcctctgcagcggaatctgttcacacccaacttggttttgctacataattatccaggaagggaataaggtacaagaagcattttgtaagttgaagcaaatcgaatgaaattaactgggtaatgaaacaaagagttcaagaaataagtttttgtttcacagcctataaccagacacatactcatttttcatgataatgaacagaacatagacagaagaaacaaggttttcagtccccacagataactgaaaattatttaaaccgctaaaagaaactttctttctcactaaatcttttataggatttatttaaaatagcaaaagaagaagtttcatcattttttacttcctctctgagtggactggcctcaaagcaagcattcagaagaaaaagaagcaacctcagtaatttagaaatcattttgcaatcccttaatatcctaaacatcattcatttttgttgttgttgttgttgttgagacagagtctcgctctgtcgccaggctagagtgcggtggcgcgatcttgactcactgcaatctccacctcccacaggttcaggcgattcccgtgcctcagcctcctgagtagctgggactacaggcacgcaccaccatgccaggctaatttttttgtattttagcagagacggggtttcaccatgttggccaggatggtctcgatctcctgacctcgtgatccacccgactcggcctcccaaagtgctgggattacaggtgtaagccaccgtgcccagccctaaacatcattcttgagagcattgggatatctcctgaaaaggtttatgaaaaagaagaatctcatctcagtgaagaatacttctcattttttaaaaaagcttaaaactttgaagttagctttaacttaaatagtatttcccatttatcgcagaccttttttaggaagcaagcttaatggctgataattttaaattctctctcttgcaggaaggactatgaaaagctagaattgagtgtttaaagttcaacatgttatttgtaatagatgtttgatagattttctgctactttgctgctatggttttctccaagagctacataatttagtttcatataaagtatcatcagtgtagaacctaattcaattcaaagctgtgtgtttggaagactatcttactatttcacaacagcctgacaacatttctatagccaaaaatagctaaatacctcaatcagtctcagaatgtcattttggtactttggtggccacataagccattattcactagtatgactagttgtgtctggcagtttatatttaactctctttatgtctgtggattttttccttcaaagtttaataaatttattttcttggattcctgatagtgtgcttctgttatcaaacaccaacataaaaatgatctaaacca

SEQ ID NO: 20 - DNA, 20 bp, Artificial sequence
  Synthetic oligonucleotide
acctccgagcttcgcctctg

SEQ ID NO: 21 - DNA, 20 bp, Artificial sequence
  Synthetic oligonucleotide
ctgtaggacctccgagcttc

SEQ ID NO: 22 - DNA, 20 bp, Artificial sequence
  Synthetic oligonucleotide
tccatacctgtaggacctcc

SEQ ID NO: 23 - DNA, 20 bp, Artificial sequence
  Synthetic oligonucleotide
tgccaaggtcaacagcagct

SEQ ID NO: 24 - DNA, 20 bp, Artificial sequence
  Synthetic oligonucleotide
ctgccagtgccaaggtcaac

SEQ ID NO: 25 - DNA, 20 bp, Artificial sequence
  Synthetic oligonucleotide
cttgatcctgccagtgccaa

SEQ ID NO: 26 - DNA, 20 bp, Artificial sequence
  Synthetic oligonucleotide
agcatcacttgatcctgcca

SEQ ID NO: 27 - DNA, 20 bp, Artificial sequence
  Synthetic oligonucleotide
cagaaaaagcatcacttgat

SEQ ID NO: 28 - DNA, 20 bp, Artificial sequence
  Synthetic oligonucleotide
tcacttccagaaaaagcatc

SEQ ID NO: 29 - DNA, 20 bp, Artificial sequence
  Synthetic oligonucleotide
gtctctcgctcaggtgaacg

SEQ ID NO: 30 - DNA, 20 bp, Artificial sequence
  Synthetic oligonucleotide
tgaaaaagtctctcgctcag

SEQ ID NO: 31 - DNA, 20 bp, Artificial sequence
  Synthetic oligonucleotide
agtggcatgaaaaagtctct

SEQ ID NO: 32 - DNA, 20 bp, Artificial sequence
  Synthetic oligonucleotide
tctgtccagtggcatgaaaa

SEQ ID NO: 33 - DNA, 20 bp, Artificial sequence
  Synthetic oligonucleotide
ggatctggttgcactatttc

SEQ ID NO: 34 - DNA, 20 bp, Artificial sequence
  Synthetic oligonucleotide
aatgggtggatctggttgca

SEQ ID NO: 35 - DNA, 20 bp, Artificial sequence
  Synthetic oligonucleotide
agtccagttgagggcaatgg

SEQ ID NO: 36 - DNA, 20 bp, Artificial sequence
  Synthetic oligonucleotide
tcagtaaagtccagttgagg

SEQ ID NO: 37 - DNA, 20 bp, Artificial sequence
  Synthetic oligonucleotide
gaatcccagttaaactgacg

SEQ ID NO: 38 - DNA, 20 bp, Artificial sequence
  Synthetic oligonucleotide
tctgcatgaatcccagttaa

SEQ ID NO: 39 - DNA, 20 bp, Artificial sequence
  Synthetic oligonucleotide
atccatcctttctgaatatc

SEQ ID NO: 40 - DNA, 20 bp, Artificial sequence
  Synthetic oligonucleotide
cagaaccatccatcctttct

SEQ ID NO: 41 - DNA, 20 bp, Artificial sequence
  Synthetic oligonucleotide
catactccagaaccatccat

SEQ ID NO: 42 - DNA, 20 bp, Artificial sequence
  Synthetic oligonucleotide
tgaagttcatactccagaac

SEQ ID NO: 43 - DNA, 20 bp, Artificial sequence
  Synthetic oligonucleotide
tttgtattgaagttcatact

SEQ ID NO: 44 - DNA, 20 bp, Artificial sequence
  Synthetic oligonucleotide
ttacttctttgtattgaagt

SEQ ID NO: 45 - DNA, 20 bp, Artificial sequence
  Synthetic oligonucleotide
gtttcatttacttctttgta

SEQ ID NO: 46 - DNA, 20 bp, Artificial sequence
  Synthetic oligonucleotide
ccatttagtttcatttactt

SEQ ID NO: 47 - DNA, 20 bp, Artificial sequence
  Synthetic oligonucleotide
tcattttccatttagtttca

SEQ ID NO: 48 - DNA, 20 bp, Artificial sequence
  Synthetic oligonucleotide
acacgcacttcatattcctt

SEQ ID NO: 49 - DNA, 20 bp, Artificial sequence
  Synthetic oligonucleotide
ggatctcacacgcacttcat

SEQ ID NO: 50 - DNA, 20 bp, Artificial sequence
  Synthetic oligonucleotide
aagtgttacatagagcacct

SEQ ID NO: 51 - DNA, 20 bp, Artificial sequence
  Synthetic oligonucleotide
tctgaggaagtgttacatag

SEQ ID NO: 52 - DNA, 20 bp, Artificial sequence
  Synthetic oligonucleotide
cttcttcacatgtaaattgg

SEQ ID NO: 53 - DNA, 20 bp, Artificial sequence
  Synthetic oligonucleotide
tagaaatcttcttcacatgt

SEQ ID NO: 54 - DNA, 20 bp, Artificial sequence
  Synthetic oligonucleotide
tggaaagtagaaatcttctt

SEQ ID NO: 55 - DNA, 20 bp, Artificial sequence
  Synthetic oligonucleotide
agagccatggaaagtagaaa

SEQ ID NO: 56 - DNA, 20 bp, Artificial sequence
  Synthetic oligonucleotide
ataattaagagccatggaaa

SEQ ID NO: 57 - DNA, 20 bp, Artificial sequence
  Synthetic oligonucleotide
cagttggtctgtgctcacat

SEQ ID NO: 58 - DNA, 20 bp, Artificial sequence
  Synthetic oligonucleotide
gtgccaaggtcaacagcagc

SEQ ID NO: 59 - DNA, 20 bp, Artificial sequence
  Synthetic oligonucleotide
agtgccaaggtcaacagcag

SEQ ID NO: 60 - DNA, 20 bp, Artificial sequence
  Synthetic oligonucleotide
catcacttgatcctgccagt

SEQ ID NO: 61 - DNA, 20 bp, Artificial sequence
  Synthetic oligonucleotide
gcatcacttgatcctgccag

SEQ ID NO: 62 - DNA, 20 bp, Artificial sequence
  Synthetic oligonucleotide
aagcatcacttgatcctgcc

SEQ ID NO: 63 - DNA, 20 bp, Artificial sequence
  Synthetic oligonucleotide
aaagcatcacttgatcctgc

SEQ ID NO: 64 - DNA, 20 bp, Artificial sequence
  Synthetic oligonucleotide
atctcacacgcacttcatat

SEQ ID NO: 65 - DNA, 20 bp, Artificial sequence
  Synthetic oligonucleotide
gatctcacacgcacttcata

SEQ ID NO: 66 - DNA, 20 bp, Artificial sequence
  Synthetic oligonucleotide
tggatctcacacgcacttca

SEQ ID NO: 67 - DNA, 20 bp, Artificial sequence
  Synthetic oligonucleotide
ttggatctcacacgcacttc

SEQ ID NO: 68 - DNA, 20 bp, Artificial sequence
  Synthetic oligonucleotide
tccagaatgtcaggttcaca

SEQ ID NO: 69 - DNA, 20 bp, Artificial sequence
  Synthetic oligonucleotide
ctccagaatgtcaggttcac

SEQ ID NO: 70 - DNA, 20 bp, Artificial sequence
  Synthetic oligonucleotide
gtctccagaatgtcaggttc

SEQ ID NO: 71 - DNA, 20 bp, Artificial sequence
  Synthetic oligonucleotide
agtctccagaatgtcaggtt

SEQ ID NO: 72 - DNA, 20 bp, Artificial sequence
  Synthetic oligonucleotide
gcttggataacactgggctg

SEQ ID NO: 73 - DNA, 20 bp, Artificial sequence
  Synthetic oligonucleotide
tgcttggataacactgggct

SEQ ID NO: 74 - DNA, 20 bp, Artificial sequence
  Synthetic oligonucleotide
tctgcttggataacactggg

SEQ ID NO: 75 - DNA, 20 bp, Artificial sequence
  Synthetic oligonucleotide
ctctgcttggataacactgg

SEQ ID NO: 76 - DNA, 20 bp, Artificial sequence
  Synthetic oligonucleotide
tctctgcttggataacactg

SEQ ID NO: 77 - DNA, 20 bp, Artificial sequence
  Synthetic oligonucleotide
cagagtgagaccatttccgg

SEQ ID NO: 78 - DNA, 20 bp, Artificial sequence
  Synthetic oligonucleotide
gcagagtgagaccatttccg

SEQ ID NO: 79 - DNA, 20 bp, Artificial sequence
  Synthetic oligonucleotide
tggcagagtgagaccatttc

SEQ ID NO: 80 - DNA, 20 bp, Artificial sequence
  Synthetic oligonucleotide
ttggcagagtgagaccattt

SEQ ID NO: 81 - DNA, 20 bp, Artificial sequence
  Synthetic oligonucleotide
cttggcagagtgagaccatt

SEQ ID NO: 82 - DNA, 20 bp, Artificial sequence
  Synthetic oligonucleotide
cagtgtgtagtgtaatataa

SEQ ID NO: 83 - DNA, 20 bp, Artificial sequence
  Synthetic oligonucleotide
acagtgtgtagtgtaatata

SEQ ID NO: 84 - DNA, 20 bp, Artificial sequence
  Synthetic oligonucleotide
acacagtgtgtagtgtaata

SEQ ID NO: 85 - DNA, 20 bp, Artificial sequence
  Synthetic oligonucleotide
tacacagtgtgtagtgtaat

SEQ ID NO: 86 - DNA, 20 bp, Artificial sequence
  Synthetic oligonucleotide
gtacacagtgtgtagtgtaa

SEQ ID NO: 87 - DNA, 20 bp, Artificial sequence
  Synthetic oligonucleotide
tgtaccttattcccttcctg

SEQ ID NO: 88 - DNA, 20 bp, Artificial sequence
  Synthetic oligonucleotide
ttgtaccttattcccttcct

SEQ ID NO: 89 - DNA, 20 bp, Artificial sequence
  Synthetic oligonucleotide
tcttgtaccttattcccttc

SEQ ID NO: 90 - DNA, 20 bp, Artificial sequence
  Synthetic oligonucleotide
ttcttgtaccttattccctt

SEQ ID NO: 91 - DNA, 20 bp, Artificial sequence
  Synthetic oligonucleotide
acatgtacccaaaccaacac

SEQ ID NO: 92 - DNA, 20 bp, Artificial sequence
  Synthetic oligonucleotide
cttcttgtaccttattccct

SEQ ID NO: 93 - DNA, 20 bp, Artificial sequence
  Synthetic oligonucleotide
tgcttcttgtaccttattcc

SEQ ID NO: 94 - DNA, 20 bp, Artificial sequence
  Synthetic oligonucleotide
atgcttcttgtaccttattc

SEQ ID NO: 95 - DNA, 20 bp, Artificial sequence
  Synthetic oligonucleotide
aaatgcttcttgtaccttat

SEQ ID NO: 96 - DNA, 20 bp, Artificial sequence
  Synthetic oligonucleotide
aaaatgcttcttgtacctta

SEQ ID NO: 97 - DNA, 20 bp, Artificial sequence
  Synthetic oligonucleotide
caaaatgcttcttgtacctt

SEQ ID NO: 98 - DNA, 20 bp, Artificial sequence
  Synthetic oligonucleotide
cttctgaatgcttgctttga

SEQ ID NO: 99 - DNA, 20 bp, Artificial sequence
  Synthetic oligonucleotide
tcttctgaatgcttgctttg

SEQ ID NO: 100 - DNA, 20 bp, Artificial sequence
  Synthetic oligonucleotide
tttcttctgaatgcttgctt

SEQ ID NO: 101 - DNA, 20 bp, Artificial sequence
  Synthetic oligonucleotide
ttttcttctgaatgcttgct

SEQ ID NO: 102 - DNA, 20 bp, Artificial sequence
  Synthetic oligonucleotide
tttttcttctgaatgcttgc

SEQ ID NO: 103 - DNA, 20 bp, Artificial sequence
  Synthetic oligonucleotide
tgcgataaatgggaaatact

SEQ ID NO: 104 - DNA, 20 bp, Artificial sequence
  Synthetic oligonucleotide
ctgcgataaatgggaaatac

SEQ ID NO: 105 - DNA, 20 bp, Artificial sequence
  Synthetic oligonucleotide
tctgcgataaatgggaaata

SEQ ID NO: 106 - DNA, 20 bp, Artificial sequence
  Synthetic oligonucleotide
ggtctgcgataaatgggaaa

SEQ ID NO: 107 - DNA, 20 bp, Artificial sequence
  Synthetic oligonucleotide
aggtctgcgataaatgggaa

SEQ ID NO: 108 - DNA, 20 bp, Artificial sequence
  Synthetic oligonucleotide
aaaggtctgcgataaatggg

SEQ ID NO: 109 - DNA, 20 bp, Artificial sequence
  Synthetic oligonucleotide
aaaaggtctgcgataaatgg

SEQ ID NO: 110 - DNA, 20 bp, Artificial sequence
  Synthetic oligonucleotide
aaaaaggtctgcgataaatg

SEQ ID NO: 111 - DNA, 20 bp, Artificial sequence
  Synthetic oligonucleotide
catgaaggccactcttccaa

SEQ ID NO: 112 - DNA, 20 bp, Artificial sequence
  Synthetic oligonucleotide
ccatgaaggccactcttcca

SEQ ID NO: 113 - DNA, 20 bp, Artificial sequence
  Synthetic oligonucleotide
cccatgaaggccactcttcc

SEQ ID NO: 114 - DNA, 20 bp, Artificial sequence
  Synthetic oligonucleotide
tgcccatgaaggccactctt

SEQ ID NO: 115 - DNA, 20 bp, Artificial sequence
  Synthetic oligonucleotide
ttgcccatgaaggccactct

SEQ ID NO: 116 - DNA, 20 bp, Artificial sequence
  Synthetic oligonucleotide
gttgcccatgaaggccactc

SEQ ID NO: 117 - DNA, 20 bp, Artificial sequence
  Synthetic oligonucleotide
ggtctttcatgaatcaagct

SEQ ID NO: 118 - DNA, 20 bp, Artificial sequence
  Synthetic oligonucleotide
tggtctttcatgaatcaagc

SEQ ID NO: 119 - DNA, 20 bp, Artificial sequence
  Synthetic oligonucleotide
atggtctttcatgaatcaag

SEQ ID NO: 120 - DNA, 20 bp, Artificial sequence
  Synthetic oligonucleotide
tgatggtctttcatgaatca

SEQ ID NO: 121 - DNA, 20 bp, Artificial sequence
  Synthetic oligonucleotide
ctgatggtctttcatgaatc

SEQ ID NO: 122 - DNA, 20 bp, Artificial sequence
  Synthetic oligonucleotide
gctgatggtctttcatgaat

SEQ ID NO: 123 - DNA, 20 bp, Artificial sequence
  Synthetic oligonucleotide
gtacccaaaccaacactaat

SEQ ID NO: 124 - DNA, 20 bp, Artificial sequence
  Synthetic oligonucleotide
tgtacccaaaccaacactaa

SEQ ID NO: 125 - DNA, 20 bp, Artificial sequence
  Synthetic oligonucleotide
atgtacccaaaccaacacta

SEQ ID NO: 126 - DNA, 20 bp, Artificial sequence
  Synthetic oligonucleotide
gacatgtacccaaaccaaca

SEQ ID NO: 127 - DNA, 20 bp, Artificial sequence
  Synthetic oligonucleotide
agacatgtacccaaaccaac

SEQ ID NO: 128 - DNA, 20 bp, Artificial sequence
  Synthetic oligonucleotide
aggaatggaaaaccaaatat

SEQ ID NO: 129 - DNA, 20 bp, Artificial sequence
  Synthetic oligonucleotide
caggaatggaaaaccaaata

SEQ ID NO: 130 - DNA, 20 bp, Artificial sequence
  Synthetic oligonucleotide
tcaggaatggaaaaccaaat

SEQ ID NO: 131 - DNA, 20 bp, Artificial sequence
  Synthetic oligonucleotide
actcaggaatggaaaaccaa

SEQ ID NO: 132 - DNA, 20 bp, Artificial sequence
  Synthetic oligonucleotide
aactcaggaatggaaaacca

SEQ ID NO: 133 - DNA, 20 bp, Artificial sequence
  Synthetic oligonucleotide
taactcaggaatggaaaacc

SEQ ID NO: 134 - DNA, 20 bp, Artificial sequence
  Synthetic oligonucleotide
caaaattactgcagtcacag

SEQ ID NO: 135 - DNA, 20 bp, Artificial sequence
  Synthetic oligonucleotide
acaaaattactgcagtcaca

SEQ ID NO: 136 - DNA, 20 bp, Artificial sequence
  Synthetic oligonucleotide
tacaaaattactgcagtcac

SEQ ID NO: 137 - DNA, 20 bp, Artificial sequence
  Synthetic oligonucleotide
catacaaaattactgcagtc

SEQ ID NO: 138 - DNA, 20 bp, Artificial sequence
  Synthetic oligonucleotide
acatacaaaattactgcagt

SEQ ID NO: 139 - DNA, 20 bp, Artificial sequence
  Synthetic oligonucleotide
aacatacaaaattactgcag

SEQ ID NO: 140 - DNA, 20 bp, Artificial sequence
  Synthetic oligonucleotide
ttttagtatgaaccttaaaa

SEQ ID NO: 141 - DNA, 20 bp, Artificial sequence
  Synthetic oligonucleotide
cttttagtatgaaccttaaa

SEQ ID NO: 142 - DNA, 20 bp, Artificial sequence
  Synthetic oligonucleotide
tcttttagtatgaaccttaa

SEQ ID NO: 143 - DNA, 20 bp, Artificial sequence
  Synthetic oligonucleotide
aatcttttagtatgaacctt

SEQ ID NO: 144 - DNA, 20 bp, Artificial sequence
  Synthetic oligonucleotide
caatcttttagtatgaacct

SEQ ID NO: 145 - DNA, 20 bp, Artificial sequence
  Synthetic oligonucleotide
acaatcttttagtatgaacc

SEQ ID NO: 146 - DNA, 20 bp, Artificial sequence
  Synthetic oligonucleotide
aagttatgtgactctgagca

SEQ ID NO: 147 - DNA, 20 bp, Artificial sequence
  Synthetic oligonucleotide
caagttatgtgactctgagc

SEQ ID NO: 148 - DNA, 20 bp, Artificial sequence
  Synthetic oligonucleotide
tcaagttatgtgactctgag

SEQ ID NO: 149 - DNA, 20 bp, Artificial sequence
  Synthetic oligonucleotide
agttctccattagggttctg

SEQ ID NO: 150 - DNA, 20 bp, Artificial sequence
  Synthetic oligonucleotide
tagttctccattagggttct

SEQ ID NO: 151 - DNA, 20 bp, Artificial sequence
  Synthetic oligonucleotide
atagttctccattagggttc

SEQ ID NO: 152 - DNA, 20 bp, Artificial sequence
  Synthetic oligonucleotide
aagcaggttggcagacagac

SEQ ID NO: 153 - DNA, 20 bp, Artificial sequence
  Synthetic oligonucleotide
gaagcaggttggcagacaga

SEQ ID NO: 154 - DNA, 20 bp, Artificial sequence
  Synthetic oligonucleotide
ggaagcaggttggcagacag

SEQ ID NO: 155 - DNA, 20 bp, Artificial sequence
  Synthetic oligonucleotide
tcttcttgtgagctggcttc

SEQ ID NO: 156 - DNA, 20 bp, Artificial sequence
  Synthetic oligonucleotide
gtcttcttgtgagctggctt

SEQ ID NO: 157 - DNA, 20 bp, Artificial sequence
  Synthetic oligonucleotide
agtcttcttgtgagctggct

SEQ ID NO: 158 - DNA, 20 bp, Artificial sequence
  Synthetic oligonucleotide
taagtcttcttgtgagctgg

SEQ ID NO: 159 - DNA, 20 bp, Artificial sequence
  Synthetic oligonucleotide
ttaagtcttcttgtgagctg

SEQ ID NO: 160 - DNA, 20 bp, Artificial sequence
  Synthetic oligonucleotide
attaagtcttcttgtgagct

SEQ ID NO: 161 - DNA, 20 bp, Artificial sequence
  Synthetic oligonucleotide
tctcttccactcacatccat

SEQ ID NO: 162 - DNA, 20 bp, Artificial sequence
  Synthetic oligonucleotide
gtctcttccactcacatcca

SEQ ID NO: 163 - DNA, 20 bp, Artificial sequence
  Synthetic oligonucleotide
agtctcttccactcacatcc

SEQ ID NO: 164 - DNA, 20 bp, Artificial sequence
  Synthetic oligonucleotide
taagtatttgtagcagttgc

SEQ ID NO: 165 - DNA, 20 bp, Artificial sequence
  Synthetic oligonucleotide
ctaagtatttgtagcagttg

SEQ ID NO: 166 - DNA, 20 bp, Artificial sequence
  Synthetic oligonucleotide
gctaagtatttgtagcagtt

SEQ ID NO: 167 - DNA, 20 bp, Artificial sequence
  Synthetic oligonucleotide
tggctaagtatttgtagcag

SEQ ID NO: 168 - DNA, 20 bp, Artificial sequence
  Synthetic oligonucleotide
ttggctaagtatttgtagca

SEQ ID NO: 169 - DNA, 20 bp, Artificial sequence
  Synthetic oligonucleotide
tttggctaagtatttgtagc

SEQ ID NO: 170 - DNA, 20 bp, Artificial sequence
  Synthetic oligonucleotide
aaaatgtcaacagtgcatag

SEQ ID NO: 171 - DNA, 20 bp, Artificial sequence
  Synthetic oligonucleotide
caaaatgtcaacagtgcata

SEQ ID NO: 172 - DNA, 20 bp, Artificial sequence
  Synthetic oligonucleotide
ccaaaatgtcaacagtgcat

SEQ ID NO: 173 - DNA, 20 bp, Artificial sequence
  Synthetic oligonucleotide
gcccaaaatgtcaacagtgc

SEQ ID NO: 174 - DNA, 20 bp, Artificial sequence
  Synthetic oligonucleotide
ggcccaaaatgtcaacagtg

SEQ ID NO: 175 - DNA, 20 bp, Artificial sequence
  Synthetic oligonucleotide
tggcccaaaatgtcaacagt

SEQ ID NO: 176 - DNA, 20 bp, Artificial sequence
  Synthetic oligonucleotide
cagaatcttctctttggcca

SEQ ID NO: 177 - DNA, 20 bp, Artificial sequence
  Synthetic oligonucleotide
gcagaatcttctctttggcc

SEQ ID NO: 178 - DNA, 20 bp, Artificial sequence
  Synthetic oligonucleotide
tgcagaatcttctctttggc

SEQ ID NO: 179 - DNA, 20 bp, Artificial sequence
  Synthetic oligonucleotide
tttgcagaatcttctctttg

SEQ ID NO: 180 - DNA, 20 bp, Artificial sequence
  Synthetic oligonucleotide
atttgcagaatcttctcttt

SEQ ID NO: 181 - DNA, 20 bp, Artificial sequence
  Synthetic oligonucleotide
aatttgcagaatcttctctt

SEQ ID NO: 182 - DNA, 20 bp, Artificial sequence
  Synthetic oligonucleotide
ataaagctatgccataaagc

SEQ ID NO: 183 - DNA, 20 bp, Artificial sequence
  Synthetic oligonucleotide
cataaagctatgccataaag

SEQ ID NO: 184 - DNA, 20 bp, Artificial sequence
  Synthetic oligonucleotide
ccataaagctatgccataaa

SEQ ID NO: 185 - DNA, 20 bp, Artificial sequence
  Synthetic oligonucleotide
gaccataaagctatgccata

SEQ ID NO: 186 - DNA, 20 bp, Artificial sequence
  Synthetic oligonucleotide
tgaccataaagctatgccat

SEQ ID NO: 187 - DNA, 20 bp, Artificial sequence
  Synthetic oligonucleotide
ctgaccataaagctatgcca

SEQ ID NO: 188 - DNA, 20 bp, Artificial sequence
  Synthetic oligonucleotide
caaaaagttgagctgagaaa

SEQ ID NO: 189 - DNA, 20 bp, Artificial sequence
  Synthetic oligonucleotide
ccaaaaagttgagctgagaa

SEQ ID NO: 190 - DNA, 20 bp, Artificial sequence
  Synthetic oligonucleotide
cccaaaaagttgagctgaga

SEQ ID NO: 191 - DNA, 20 bp, Artificial sequence
  Synthetic oligonucleotide
cacccaaaaagttgagctga

SEQ ID NO: 192 - DNA, 20 bp, Artificial sequence
  Synthetic oligonucleotide
acacccaaaaagttgagctg

SEQ ID NO: 193 - DNA, 20 bp, Artificial sequence
  Synthetic oligonucleotide
tacacccaaaaagttgagct

SEQ ID NO: 194 - DNA, 20 bp, Artificial sequence
  Synthetic oligonucleotide
cttttaatggcacccaagca

SEQ ID NO: 195 - DNA, 20 bp, Artificial sequence
  Synthetic oligonucleotide
gcttttaatggcacccaagc

SEQ ID NO: 196 - DNA, 20 bp, Artificial sequence
  Synthetic oligonucleotide
tgcttttaatggcacccaag

SEQ ID NO: 197 - DNA, 20 bp, Artificial sequence
  Synthetic oligonucleotide
aatgcttttaatggcaccca

SEQ ID NO: 198 - DNA, 20 bp, Artificial sequence
  Synthetic oligonucleotide
aaatgcttttaatggcaccc

SEQ ID NO: 199 - DNA, 20 bp, Artificial sequence
  Synthetic oligonucleotide
gaaatgcttttaatggcacc

SEQ ID NO: 200 - DNA, 20 bp, Artificial sequence
  Synthetic oligonucleotide
taattcttaagggccctctg

SEQ ID NO: 201 - DNA, 20 bp, Artificial sequence
  Synthetic oligonucleotide
ataattcttaagggccctct

SEQ ID NO: 202 - DNA, 20 bp, Artificial sequence
  Synthetic oligonucleotide
cataattcttaagggccctc

SEQ ID NO: 203 - DNA, 20 bp, Artificial sequence
  Synthetic oligonucleotide
agcataattcttaagggccc

SEQ ID NO: 204 - DNA, 20 bp, Artificial sequence
  Synthetic oligonucleotide
tagcataattcttaagggcc

SEQ ID NO: 205 - DNA, 20 bp, Artificial sequence
  Synthetic oligonucleotide
ttagcataattcttaagggc

SEQ ID NO: 206 - DNA, 20 bp, Artificial sequence
  Synthetic oligonucleotide
aggaatggaaaaccaaacat

SEQ ID NO: 207 - DNA, 20 bp, Artificial sequence
  Synthetic oligonucleotide
caggaatggaaaaccaaaca

SEQ ID NO: 208 - DNA, 20 bp, Artificial sequence
  Synthetic oligonucleotide
tcaggaatggaaaaccaaac

SEQ ID NO: 209 - DNA, 20 bp, Artificial sequence
  Synthetic oligonucleotide
aggaatggaaaaccaaatac

SEQ ID NO: 210 - DNA, 20 bp, Artificial sequence
  Synthetic oligonucleotide
catgactatgttctggcaag

SEQ ID NO: 211 - DNA, 20 bp, Artificial sequence
  Synthetic oligonucleotide
acatgactatgttctggcaa

SEQ ID NO: 212 - DNA, 20 bp, Artificial sequence
  Synthetic oligonucleotide
cacatgactatgttctggca

SEQ ID NO: 213 - DNA, 20 bp, Artificial sequence
  Synthetic oligonucleotide
gtcacatgactatgttctgg

SEQ ID NO: 214 - DNA, 20 bp, Artificial sequence
  Synthetic oligonucleotide
ggtcacatgactatgttctg

SEQ ID NO: 215 - DNA, 20 bp, Artificial sequence
  Synthetic oligonucleotide
tggtcacatgactatgttct

SEQ ID NO: 216 - DNA, 20 bp, Artificial sequence
  Synthetic oligonucleotide
ctgaattctgagctctggaa

SEQ ID NO: 217 - DNA, 20 bp, Artificial sequence
  Synthetic oligonucleotide
cctgaattctgagctctgga

SEQ ID NO: 218 - DNA, 20 bp, Artificial sequence
  Synthetic oligonucleotide
gcctgaattctgagctctgg

SEQ ID NO: 219 - DNA, 20 bp, Artificial sequence
  Synthetic oligonucleotide
aagcctgaattctgagctct

SEQ ID NO: 220 - DNA, 20 bp, Artificial sequence
  Synthetic oligonucleotide
caagcctgaattctgagctc

SEQ ID NO: 221 - DNA, 20 bp, Artificial sequence
  Synthetic oligonucleotide
acaagcctgaattctgagct

SEQ ID NO: 222 - DNA, 20 bp, Artificial sequence
  Synthetic oligonucleotide
ggatctcagctgcaattctt

SEQ ID NO: 223 - DNA, 20 bp, Artificial sequence
  Synthetic oligonucleotide
aggatctcagctgcaattct

SEQ ID NO: 224 - DNA, 20 bp, Artificial sequence
  Synthetic oligonucleotide
gaggatctcagctgcaattc

SEQ ID NO: 225 - DNA, 20 bp, Artificial sequence
  Synthetic oligonucleotide
cagaggatctcagctgcaat

SEQ ID NO: 226 - DNA, 20 bp, Artificial sequence
  Synthetic oligonucleotide
gcagaggatctcagctgcaa

SEQ ID NO: 227 - DNA, 20 bp, Artificial sequence
  Synthetic oligonucleotide
aaaagcatcacttgatcctg

SEQ ID NO: 228 - DNA, 17 bp, Artificial sequence
  Synthetic oligonucleotide
caaggtcaacagcagct

SEQ ID NO: 229 - DNA, 17 bp, Artificial sequence
  Synthetic oligonucleotide
ccaaggtcaacagcagc

SEQ ID NO: 230 - DNA, 17 bp, Artificial sequence
  Synthetic oligonucleotide
gccaaggtcaacagcag

SEQ ID NO: 231 - DNA, 17 bp, Artificial sequence
  Synthetic oligonucleotide
tctcacacgcacttcat

SEQ ID NO: 232 - DNA, 17 bp, Artificial sequence
  Synthetic oligonucleotide
atctcacacgcacttca

SEQ ID NO: 233 - DNA, 17 bp, Artificial sequence
  Synthetic oligonucleotide
gatctcacacgcacttc

SEQ ID NO: 234 - DNA, 17 bp, Artificial sequence
  Synthetic oligonucleotide
ctttcatgaatcaagct

SEQ ID NO: 235 - DNA, 17 bp, Artificial sequence
  Synthetic oligonucleotide
tctttcatgaatcaagc

SEQ ID NO: 236 - DNA, 17 bp, Artificial sequence
  Synthetic oligonucleotide
gtctttcatgaatcaag

SEQ ID NO: 237 - DNA, 17 bp, Artificial sequence
  Synthetic oligonucleotide
ggtctttcatgaatcaa

SEQ ID NO: 238 - DNA, 17 bp, Artificial sequence
  Synthetic oligonucleotide
atggtctttcatgaatc

SEQ ID NO: 239 - DNA, 17 bp, Artificial sequence
  Synthetic oligonucleotide
gatggtctttcatgaat

SEQ ID NO: 240 - DNA, 17 bp, Artificial sequence
  Synthetic oligonucleotide
tatatcaatattctccc

SEQ ID NO: 241 - DNA, 17 bp, Artificial sequence
  Synthetic oligonucleotide
ttatatcaatattctcc

SEQ ID NO: 242 - DNA, 17 bp, Artificial sequence
  Synthetic oligonucleotide
gttatatcaatattctc

SEQ ID NO: 243 - DNA, 17 bp, Artificial sequence
  Synthetic oligonucleotide
tttctttagcaatagtt

SEQ ID NO: 244 - DNA, 17 bp, Artificial sequence
  Synthetic oligonucleotide
ctttctttagcaatagt

SEQ ID NO: 245 - DNA, 17 bp, Artificial sequence
  Synthetic oligonucleotide
gctttctttagcaatag

SEQ ID NO: 246 - DNA, 17 bp, Artificial sequence
  Synthetic oligonucleotide
aggaatggaaaaccaaa

SEQ ID NO: 247 - DNA, 17 bp, Artificial sequence
  Synthetic oligonucleotide
caggaatggaaaaccaa

SEQ ID NO: 248 - DNA, 17 bp, Artificial sequence
  Synthetic oligonucleotide
tcaggaatggaaaacca

SEQ ID NO: 249 - DNA, 17 bp, Artificial sequence
  Synthetic oligonucleotide
tctccattagggttctg

SEQ ID NO: 250 - DNA, 17 bp, Artificial sequence
  Synthetic oligonucleotide
ttctccattagggttct

SEQ ID NO: 251 - DNA, 17 bp, Artificial sequence
  Synthetic oligonucleotide
gttctccattagggttc

SEQ ID NO: 252 - DNA, 17 bp, Artificial sequence
  Synthetic oligonucleotide
aggttggcagacagaca

SEQ ID NO: 253 - DNA, 17 bp, Artificial sequence
  Synthetic oligonucleotide
caggttggcagacagac

SEQ ID NO: 254 - DNA, 17 bp, Artificial sequence
  Synthetic oligonucleotide
gcaggttggcagacaga

SEQ ID NO: 255 - DNA, 17 bp, Artificial sequence
  Synthetic oligonucleotide
cttcttgtgagctggct

SEQ ID NO: 256 - DNA, 17 bp, Artificial sequence
  Synthetic oligonucleotide
tcttcttgtgagctggc

SEQ ID NO: 257 - DNA, 17 bp, Artificial sequence
  Synthetic oligonucleotide
gtcttcttgtgagctgg

SEQ ID NO: 258 - DNA, 17 bp, Artificial sequence
  Synthetic oligonucleotide
agtcttcttgtgagctg

SEQ ID NO: 259 - DNA, 17 bp, Artificial sequence
  Synthetic oligonucleotide
tcttccactcacatcca

SEQ ID NO: 260 - DNA, 17 bp, Artificial sequence
  Synthetic oligonucleotide
ctcttccactcacatcc

SEQ ID NO: 261 - DNA, 17 bp, Artificial sequence
  Synthetic oligonucleotide
tctcttccactcacatc

SEQ ID NO: 262 - DNA, 17 bp, Artificial sequence
  Synthetic oligonucleotide
gtctcttccactcacat

SEQ ID NO: 263 - DNA, 17 bp, Artificial sequence
  Synthetic oligonucleotide
atagattttgacttccc

SEQ ID NO: 264 - DNA, 17 bp, Artificial sequence
  Synthetic oligonucleotide
catagattttgacttcc

SEQ ID NO: 265 - DNA, 17 bp, Artificial sequence
  Synthetic oligonucleotide
gcatagattttgacttc

SEQ ID NO: 266 - DNA, 17 bp, Artificial sequence
  Synthetic oligonucleotide
aaaatgtcaacagtgca

SEQ ID NO: 267 - DNA, 17 bp, Artificial sequence
  Synthetic oligonucleotide
caaaatgtcaacagtgc

SEQ ID NO: 268 - DNA, 17 bp, Artificial sequence
  Synthetic oligonucleotide
ccaaaatgtcaacagtg

SEQ ID NO: 269 - DNA, 17 bp, Artificial sequence
  Synthetic oligonucleotide
cccaaaatgtcaacagt

SEQ ID NO: 270 - DNA, 17 bp, Artificial sequence
  Synthetic oligonucleotide
catgactatgttctggc

SEQ ID NO: 271 - DNA, 17 bp, Artificial sequence
  Synthetic oligonucleotide
acatgactatgttctgg

SEQ ID NO: 272 - DNA, 17 bp, Artificial sequence
  Synthetic oligonucleotide
cacatgactatgttctg

SEQ ID NO: 273 - DNA, 17 bp, Artificial sequence
  Synthetic oligonucleotide
gaattctgagctctgga

SEQ ID NO: 274 - DNA, 17 bp, Artificial sequence
  Synthetic oligonucleotide
tgaattctgagctctgg

SEQ ID NO: 275 - DNA, 17 bp, Artificial sequence
  Synthetic oligonucleotide
ctgaattctgagctctg

SEQ ID NO: 276 - DNA, 17 bp, Artificial sequence
  Synthetic oligonucleotide
cctgaattctgagctct

SEQ ID NO: 277 - DNA, 17 bp, Artificial sequence
  Synthetic oligonucleotide
gcctgaattctgagctc

SEQ ID NO: 278 - DNA, 17 bp, Artificial sequence
  Synthetic oligonucleotide
agcctgaattctgagct

SEQ ID NO: 279 - DNA, 17 bp, Artificial sequence
  Synthetic oligonucleotide
atattgtaattcttggt

SEQ ID NO: 280 - DNA, 17 bp, Artificial sequence
  Synthetic oligonucleotide
gatattgtaattcttgg

SEQ ID NO: 281 - DNA, 17 bp, Artificial sequence
  Synthetic oligonucleotide
tgatattgtaattcttg

SEQ ID NO: 282 - DNA, 17 bp, Artificial sequence
  Synthetic oligonucleotide
ctgatattgtaattctt

SEQ ID NO: 283 - DNA, 17 bp, Artificial sequence
  Synthetic oligonucleotide
cctgatattgtaattct

SEQ ID NO: 284 - DNA, 17 bp, Artificial sequence
  Synthetic oligonucleotide
gcctgatattgtaattc

SEQ ID NO: 285 - DNA, 17 bp, Artificial sequence
  Synthetic oligonucleotide
tgcctgatattgtaatt

SEQ ID NO: 286 - DNA, 17 bp, Artificial sequence
  Synthetic oligonucleotide
aattatgtgctttgcct

SEQ ID NO: 287 - DNA, 17 bp, Artificial sequence
  Synthetic oligonucleotide
caattatgtgctttgcc

SEQ ID NO: 288 - DNA, 17 bp, Artificial sequence
  Synthetic oligonucleotide
tcaattatgtgctttgc

SEQ ID NO: 289 - DNA, 17 bp, Artificial sequence
  Synthetic oligonucleotide
gtcaattatgtgctttg

SEQ ID NO: 290 - DNA, 17 bp, Artificial sequence
  Synthetic oligonucleotide
gccatcaccaaacacca

SEQ ID NO: 291 - DNA, 17 bp, Artificial sequence
  Synthetic oligonucleotide
tgccatcaccaaacacc

SEQ ID NO: 292 - DNA, 17 bp, Artificial sequence
  Synthetic oligonucleotide
ttgccatcaccaaacac

SEQ ID NO: 293 - DNA, 17 bp, Artificial sequence
  Synthetic oligonucleotide
tggtgactctgcctgat

SEQ ID NO: 294 - DNA, 17 bp, Artificial sequence
  Synthetic oligonucleotide
ctggtgactctgcctga

SEQ ID NO: 295 - DNA, 20 bp, Artificial sequence
  Synthetic oligonucleotide
tatttcagaaagactttctg

SEQ ID NO: 296 - DNA, 20 bp, Artificial sequence
  Synthetic oligonucleotide
aggaaaaaatcaaggagtta

SEQ ID NO: 297 - DNA, 20 bp, Artificial sequence
  Synthetic oligonucleotide
tatttactgaacacctattc

SEQ ID NO: 298 - DNA, 20 bp, Artificial sequence
  Synthetic oligonucleotide
gcccatgaaggccactcttc

SEQ ID NO: 299 - DNA, 20 bp, Artificial sequence
  Synthetic oligonucleotide
acctataaataaagtgagga

SEQ ID NO: 300 - DNA, 20 bp, Artificial sequence
  Synthetic oligonucleotide
gtttcataacctgctaataa

SEQ ID NO: 301 - DNA, 20 bp, Artificial sequence
  Synthetic oligonucleotide
atgtgccttacagttatcag

SEQ ID NO: 302 - DNA, 20 bp, Artificial sequence
  Synthetic oligonucleotide
ttctgaatttagaattatag

SEQ ID NO: 303 - DNA, 20 bp, Artificial sequence
  Synthetic oligonucleotide
gtttataatctagcagttac

SEQ ID NO: 304 - DNA, 20 bp, Artificial sequence
  Synthetic oligonucleotide
gatggtctttcatgaatcaa

SEQ ID NO: 305 - DNA, 20 bp, Artificial sequence
  Synthetic oligonucleotide
catgtacccaaaccaacact

SEQ ID NO: 306 - DNA, 20 bp, Artificial sequence
  Synthetic oligonucleotide
taaaatacagcctacatcat

SEQ ID NO: 307 - DNA, 20 bp, Artificial sequence
  Synthetic oligonucleotide
ccatcactacaacaaactca

SEQ ID NO: 308 - DNA, 20 bp, Artificial sequence
  Synthetic oligonucleotide
atctgaaatgatcccctttc

SEQ ID NO: 309 - DNA, 20 bp, Artificial sequence
  Synthetic oligonucleotide
tgttgcccctccaaaaagac

SEQ ID NO: 310 - DNA, 20 bp, Artificial sequence
  Synthetic oligonucleotide
attaaaattttaaatgatgt

SEQ ID NO: 311 - DNA, 20 bp, Artificial sequence
  Synthetic oligonucleotide
ctcaggaatggaaaaccaaa

SEQ ID NO: 312 - DNA, 20 bp, Artificial sequence
  Synthetic oligonucleotide
aaaattctagaagataacat

SEQ ID NO: 313 - DNA, 20 bp, Artificial sequence
  Synthetic oligonucleotide
ctagaagtcctagccagagt

SEQ ID NO: 314 - DNA, 20 bp, Artificial sequence
  Synthetic oligonucleotide
aaccgatatcacagaaatac

SEQ ID NO: 315 - DNA, 20 bp, Artificial sequence
  Synthetic oligonucleotide
aagatagacagtaacataat

SEQ ID NO: 316 - DNA, 20 bp, Artificial sequence
  Synthetic oligonucleotide
gcactacaagaactgcttaa

SEQ ID NO: 317 - DNA, 20 bp, Artificial sequence
  Synthetic oligonucleotide
tttccagacaaagaattcag

SEQ ID NO: 318 - DNA, 20 bp, Artificial sequence
  Synthetic oligonucleotide
gtagacagcctttctggaac

SEQ ID NO: 319 - DNA, 20 bp, Artificial sequence
  Synthetic oligonucleotide
catcctacatagtggctgtg

SEQ ID NO: 320 - DNA, 20 bp, Artificial sequence
  Synthetic oligonucleotide
cagaacagtgtgtggagact

SEQ ID NO: 321 - DNA, 20 bp, Artificial sequence
  Synthetic oligonucleotide
agctttaaaaatacctctgc

SEQ ID NO: 322 - DNA, 20 bp, Artificial sequence
  Synthetic oligonucleotide
cccaggtacttgctctcaga

SEQ ID NO: 323 - DNA, 20 bp, Artificial sequence
  Synthetic oligonucleotide
ttacacctgattctagaaat

SEQ ID NO: 324 - DNA, 20 bp, Artificial sequence
  Synthetic oligonucleotide
cttttctctacaacctcaca

SEQ ID NO: 325 - DNA, 20 bp, Artificial sequence
  Synthetic oligonucleotide
tagtagtttgaatttcaaag

SEQ ID NO: 326 - DNA, 20 bp, Artificial sequence
  Synthetic oligonucleotide
atacaaaattactgcagtca

SEQ ID NO: 327 - DNA, 20 bp, Artificial sequence
  Synthetic oligonucleotide
gccactgccaaaaaggagga

SEQ ID NO: 328 - DNA, 20 bp, Artificial sequence
  Synthetic oligonucleotide
tgacagaaacagagctatga

SEQ ID NO: 329 - DNA, 20 bp, Artificial sequence
  Synthetic oligonucleotide
atcttttagtatgaacctta

SEQ ID NO: 330 - DNA, 20 bp, Artificial sequence
  Synthetic oligonucleotide
agttatgtgactctgagcac

SEQ ID NO: 331 - DNA, 20 bp, Artificial sequence
  Synthetic oligonucleotide
actatgccctagttacttct

SEQ ID NO: 332 - DNA, 20 bp, Artificial sequence
  Synthetic oligonucleotide
tatagtggaagtgatagatc

SEQ ID NO: 333 - DNA, 20 bp, Artificial sequence
  Synthetic oligonucleotide
tgttttctgaaatggaatgt

SEQ ID NO: 334 - DNA, 20 bp, Artificial sequence
  Synthetic oligonucleotide
gctgtaaatgtaatgagtgt

SEQ ID NO: 335 - DNA, 20 bp, Artificial sequence
  Synthetic oligonucleotide
gagagaagccatggccctag

SEQ ID NO: 336 - DNA, 20 bp, Artificial sequence
  Synthetic oligonucleotide
ctctctttcccagaacaaga

SEQ ID NO: 337 - DNA, 20 bp, Artificial sequence
  Synthetic oligonucleotide
tccaaaatgtccagtataat

SEQ ID NO: 338 - DNA, 20 bp, Artificial sequence
  Synthetic oligonucleotide
gttctccattagggttctgg

SEQ ID NO: 339 - DNA, 20 bp, Artificial sequence
  Synthetic oligonucleotide
ttagtcacccatccaccact

SEQ ID NO: 340 - DNA, 20 bp, Artificial sequence
  Synthetic oligonucleotide
catgaattcaccgagttagg

SEQ ID NO: 341 - DNA, 20 bp, Artificial sequence
  Synthetic oligonucleotide
agcaggttggcagacagaca

SEQ ID NO: 342 - DNA, 20 bp, Artificial sequence
  Synthetic oligonucleotide
gaaagacttaaattttcaca

SEQ ID NO: 343 - DNA, 20 bp, Artificial sequence
  Synthetic oligonucleotide
tagtagaggaaaaggagaat

SEQ ID NO: 344 - DNA, 20 bp, Artificial sequence
  Synthetic oligonucleotide
aaacagggtctggagtggac

SEQ ID NO: 345 - DNA, 20 bp, Artificial sequence
  Synthetic oligonucleotide
caagctgataattaaaaaga

SEQ ID NO: 346 - DNA, 20 bp, Artificial sequence
  Synthetic oligonucleotide
ataaagatacattttctggg

SEQ ID NO: 347 - DNA, 20 bp, Artificial sequence
  Synthetic oligonucleotide
caggattcttcctgcctggc

SEQ ID NO: 348 - DNA, 20 bp, Artificial sequence
  Synthetic oligonucleotide
aagtcttcttgtgagctggc

SEQ ID NO: 349 - DNA, 20 bp, Artificial sequence
  Synthetic oligonucleotide
ctcttccactcacatccatt

SEQ ID NO: 350 - DNA, 20 bp, Artificial sequence
  Synthetic oligonucleotide
cctatatcagaagacaaatg

SEQ ID NO: 351 - DNA, 20 bp, Artificial sequence
  Synthetic oligonucleotide
tcaaaaccctgccaaggtac

SEQ ID NO: 352 - DNA, 20 bp, Artificial sequence
  Synthetic oligonucleotide
tcatattctacttctgttta

SEQ ID NO: 353 - DNA, 20 bp, Artificial sequence
  Synthetic oligonucleotide
cattccagtgtttcagtaag

SEQ ID NO: 354 - DNA, 20 bp, Artificial sequence
  Synthetic oligonucleotide
ggcctggaattaatcctcag

SEQ ID NO: 355 - DNA, 20 bp, Artificial sequence
  Synthetic oligonucleotide
aatgccctctccctgtgcct

SEQ ID NO: 356 - DNA, 20 bp, Artificial sequence
  Synthetic oligonucleotide
tttataatcaacctttgcta

SEQ ID NO: 357 - DNA, 20 bp, Artificial sequence
  Synthetic oligonucleotide
atataactacttaaaataat

SEQ ID NO: 358 - DNA, 20 bp, Artificial sequence
  Synthetic oligonucleotide
ttagccaggatatggttgcc

SEQ ID NO: 359 - DNA, 20 bp, Artificial sequence
  Synthetic oligonucleotide
ctacctccatcaaagaaaat

SEQ ID NO: 360 - DNA, 20 bp, Artificial sequence
  Synthetic oligonucleotide
gcatgcatagataagtttga

SEQ ID NO: 361 - DNA, 20 bp, Artificial sequence
  Synthetic oligonucleotide
atgagagtaaatggattttc

SEQ ID NO: 362 - DNA, 20 bp, Artificial sequence
  Synthetic oligonucleotide
ttggcaatccttgcttaaaa

SEQ ID NO: 363 - DNA, 20 bp, Artificial sequence
  Synthetic oligonucleotide
gaattaagccagacttattt

SEQ ID NO: 364 - DNA, 20 bp, Artificial sequence
  Synthetic oligonucleotide
ggctaagtatttgtagcagt

SEQ ID NO: 365 - DNA, 20 bp, Artificial sequence
  Synthetic oligonucleotide
ttgcctgtgtgcaactggcg

SEQ ID NO: 366 - DNA, 20 bp, Artificial sequence
  Synthetic oligonucleotide
gtggccttagtaggccagct

SEQ ID NO: 367 - DNA, 20 bp, Artificial sequence
  Synthetic oligonucleotide
cccaaaatgtcaacagtgca

SEQ ID NO: 368 - DNA, 20 bp, Artificial sequence
  Synthetic oligonucleotide
ttaagccttcaatttgaaaa

SEQ ID NO: 369 - DNA, 20 bp, Artificial sequence
  Synthetic oligonucleotide
tgctcagaaggttgagcata

SEQ ID NO: 370 - DNA, 20 bp, Artificial sequence
  Synthetic oligonucleotide
ttaatgctttcccaaagctc

SEQ ID NO: 371 - DNA, 20 bp, Artificial sequence
  Synthetic oligonucleotide
aaaagacttcatacctttac

SEQ ID NO: 372 - DNA, 20 bp, Artificial sequence
  Synthetic oligonucleotide
ggccccctggcacaacagga

SEQ ID NO: 373 - DNA, 20 bp, Artificial sequence
  Synthetic oligonucleotide
tctagggtgattcaggtgga

SEQ ID NO: 374 - DNA, 20 bp, Artificial sequence
  Synthetic oligonucleotide
cttagattaatgcaaaacaa

SEQ ID NO: 375 - DNA, 20 bp, Artificial sequence
  Synthetic oligonucleotide
aggcagaggagggtggaacc

SEQ ID NO: 376 - DNA, 20 bp, Artificial sequence
  Synthetic oligonucleotide
agtctaatgagatctgatgg

SEQ ID NO: 377 - DNA, 20 bp, Artificial sequence
  Synthetic oligonucleotide
gctgaaatgagttaagactt

SEQ ID NO: 378 - DNA, 20 bp, Artificial sequence
  Synthetic oligonucleotide
actttggactgtggattttt

SEQ ID NO: 379 - DNA, 20 bp, Artificial sequence
  Synthetic oligonucleotide
gcatatttacacaatgcctg

SEQ ID NO: 380 - DNA, 20 bp, Artificial sequence
  Synthetic oligonucleotide
ggaaatgcctggatgtccag

SEQ ID NO: 381 - DNA, 20 bp, Artificial sequence
  Synthetic oligonucleotide
ctgctgattttggaatggag

SEQ ID NO: 382 - DNA, 20 bp, Artificial sequence
  Synthetic oligonucleotide
actgaacacctattctatgg

SEQ ID NO: 383 - DNA, 20 bp, Artificial sequence
  Synthetic oligonucleotide
tttactgaacacctattcta

SEQ ID NO: 384 - DNA, 20 bp, Artificial sequence
  Synthetic oligonucleotide
ccctcaaattatccacaaac

SEQ ID NO: 385 - DNA, 20 bp, Artificial sequence
  Synthetic oligonucleotide
cttctaaatgtttccaaggc

SEQ ID NO: 386 - DNA, 20 bp, Artificial sequence
  Synthetic oligonucleotide
ttacatcctgtaggctaatt

SEQ ID NO: 387 - DNA, 20 bp, Artificial sequence
  Synthetic oligonucleotide
ccactagcctggccagactt

SEQ ID NO: 388 - DNA, 20 bp, Artificial sequence
  Synthetic oligonucleotide
ctggtagatgatctcaagtt

SEQ ID NO: 389 - DNA, 20 bp, Artificial sequence
  Synthetic oligonucleotide
aaagaattgagttataaatc

SEQ ID NO: 390 - DNA, 20 bp, Artificial sequence
  Synthetic oligonucleotide
aactcatctctggccagcag

SEQ ID NO: 391 - DNA, 20 bp, Artificial sequence
  Synthetic oligonucleotide
caacatcattgtattttctg

SEQ ID NO: 392 - DNA, 20 bp, Artificial sequence
  Synthetic oligonucleotide
tcttagcttaccaatgagga

SEQ ID NO: 393 - DNA, 20 bp, Artificial sequence
  Synthetic oligonucleotide
ttcccagagccaaagctcaa

SEQ ID NO: 394 - DNA, 20 bp, Artificial sequence
  Synthetic oligonucleotide
tttggccaatcccagcttat

SEQ ID NO: 395 - DNA, 20 bp, Artificial sequence
  Synthetic oligonucleotide
gtttgcaaatcttcattcac

SEQ ID NO: 396 - DNA, 20 bp, Artificial sequence
  Synthetic oligonucleotide
caatagtccctgaggcttgg

SEQ ID NO: 397 - DNA, 20 bp, Artificial sequence
  Synthetic oligonucleotide
tttccccagattaaatgccc

SEQ ID NO: 398 - DNA, 20 bp, Artificial sequence
  Synthetic oligonucleotide
ttcaataatgcagttattat

SEQ ID NO: 399 - DNA, 20 bp, Artificial sequence
  Synthetic oligonucleotide
aaattcttgggcttaagcac

SEQ ID NO: 400 - DNA, 20 bp, Artificial sequence
  Synthetic oligonucleotide
tgatccaaattcagtaccta

SEQ ID NO: 401 - DNA, 20 bp, Artificial sequence
  Synthetic oligonucleotide
gatgatccaaattcagtacc

SEQ ID NO: 402 - DNA, 20 bp, Artificial sequence
  Synthetic oligonucleotide
caatattcatctttatattc

SEQ ID NO: 403 - DNA, 20 bp, Artificial sequence
  Synthetic oligonucleotide
attgctcttaagataagtaa

SEQ ID NO: 404 - DNA, 20 bp, Artificial sequence
  Synthetic oligonucleotide
cagctccctgaatatctctt

SEQ ID NO: 405 - DNA, 20 bp, Artificial sequence
  Synthetic oligonucleotide
acttcacaaatatattataa

SEQ ID NO: 406 - DNA, 20 bp, Artificial sequence
  Synthetic oligonucleotide
gtacagtcaactttacttca

SEQ ID NO: 407 - DNA, 20 bp, Artificial sequence
  Synthetic oligonucleotide
caattcccactcttgtcaac

SEQ ID NO: 408 - DNA, 20 bp, Artificial sequence
  Synthetic oligonucleotide
tcaactgctttctggagcag

SEQ ID NO: 409 - DNA, 20 bp, Artificial sequence
  Synthetic oligonucleotide
actgctgagcacctccaaaa

SEQ ID NO: 410 - DNA, 20 bp, Artificial sequence
  Synthetic oligonucleotide
cttagattcctggtttatca

SEQ ID NO: 411 - DNA, 20 bp, Artificial sequence
  Synthetic oligonucleotide
agttatatcaatattctccc

SEQ ID NO: 412 - DNA, 20 bp, Artificial sequence
  Synthetic oligonucleotide
tataccatcttccccataaa

SEQ ID NO: 413 - DNA, 20 bp, Artificial sequence
  Synthetic oligonucleotide
ggctttctttagcaatagtt

SEQ ID NO: 414 - DNA, 20 bp, Artificial sequence
  Synthetic oligonucleotide
taccagggatgtaggtttac

SEQ ID NO: 415 - DNA, 20 bp, Artificial sequence
  Synthetic oligonucleotide
tcacagctgaattctatctg

SEQ ID NO: 416 - DNA, 20 bp, Artificial sequence
  Synthetic oligonucleotide
ggagatggacaaattcctgc

SEQ ID NO: 417 - DNA, 20 bp, Artificial sequence
  Synthetic oligonucleotide
ctagacatgtcatcaagaca

SEQ ID NO: 418 - DNA, 20 bp, Artificial sequence
  Synthetic oligonucleotide
caaattaataaaacaattac

SEQ ID NO: 419 - DNA, 20 bp, Artificial sequence
  Synthetic oligonucleotide
tattcttatatcagacaaaa

SEQ ID NO: 420 - DNA, 20 bp, Artificial sequence
  Synthetic oligonucleotide
tcaagggatccctgccattc

SEQ ID NO: 421 - DNA, 20 bp, Artificial sequence
  Synthetic oligonucleotide
cgtcaagggatccctgccat

SEQ ID NO: 422 - DNA, 20 bp, Artificial sequence
  Synthetic oligonucleotide
ggcactcccagtctccagct

SEQ ID NO: 423 - DNA, 20 bp, Artificial sequence
  Synthetic oligonucleotide
tttctccagcagaagtgtca

SEQ ID NO: 424 - DNA, 20 bp, Artificial sequence
  Synthetic oligonucleotide
aagtcctcttccgcctccct

SEQ ID NO: 425 - DNA, 20 bp, Artificial sequence
  Synthetic oligonucleotide
ggaatttaccaaaaacagtt

SEQ ID NO: 426 - DNA, 20 bp, Artificial sequence
  Synthetic oligonucleotide
agttaggtattgtccatttt

SEQ ID NO: 427 - DNA, 20 bp, Artificial sequence
  Synthetic oligonucleotide
acatgggtatcttctaggaa

SEQ ID NO: 428 - DNA, 20 bp, Artificial sequence
  Synthetic oligonucleotide
tcagtttcagagagacaaaa

SEQ ID NO: 429 - DNA, 20 bp, Artificial sequence
  Synthetic oligonucleotide
tttgccaggtcctatgtcga

SEQ ID NO: 430 - DNA, 20 bp, Artificial sequence
  Synthetic oligonucleotide
attcccttttctctacaacc

SEQ ID NO: 431 - DNA, 20 bp, Artificial sequence
  Synthetic oligonucleotide
atgataagagccaagatttg

SEQ ID NO: 432 - DNA, 20 bp, Artificial sequence
  Synthetic oligonucleotide
gaaaaaaggtccactgtggt

SEQ ID NO: 433 - DNA, 20 bp, Artificial sequence
  Synthetic oligonucleotide
cctgtcctggaatagtttca

SEQ ID NO: 434 - DNA, 20 bp, Artificial sequence
  Synthetic oligonucleotide
tagaaaagtaaataaggaat

SEQ ID NO: 435 - DNA, 20 bp, Artificial sequence
  Synthetic oligonucleotide
ttataaaactatgcaatagg

SEQ ID NO: 436 - DNA, 20 bp, Artificial sequence
  Synthetic oligonucleotide
ttatttcatatttccagaaa

SEQ ID NO: 437 - DNA, 20 bp, Artificial sequence
  Synthetic oligonucleotide
catgaattacagctaaagat

SEQ ID NO: 438 - DNA, 20 bp, Artificial sequence
  Synthetic oligonucleotide
ttgcatgtatgtgtttctga

SEQ ID NO: 439 - DNA, 20 bp, Artificial sequence
  Synthetic oligonucleotide
tcaatctctttataccctta

SEQ ID NO: 440 - DNA, 20 bp, Artificial sequence
  Synthetic oligonucleotide
tcttcaatctctttataccc

SEQ ID NO: 441 - DNA, 20 bp, Artificial sequence
  Synthetic oligonucleotide
ctatgccctagttacttcta

SEQ ID NO: 442 - DNA, 20 bp, Artificial sequence
  Synthetic oligonucleotide
aaagagaatctcttcctttt

SEQ ID NO: 443 - DNA, 20 bp, Artificial sequence
  Synthetic oligonucleotide
tcattaaagattattataac

SEQ ID NO: 444 - DNA, 20 bp, Artificial sequence
  Synthetic oligonucleotide
tttggatgagtggaaggcta

SEQ ID NO: 445 - DNA, 20 bp, Artificial sequence
  Synthetic oligonucleotide
ggaaatggcctttttcctta

SEQ ID NO: 446 - DNA, 20 bp, Artificial sequence
  Synthetic oligonucleotide
ggagaagccctctgcctgta

SEQ ID NO: 447 - DNA, 20 bp, Artificial sequence
  Synthetic oligonucleotide
aaaccatattgtccaccaga

SEQ ID NO: 448 - DNA, 20 bp, Artificial sequence
  Synthetic oligonucleotide
ctcaaaccatattgtccacc

SEQ ID NO: 449 - DNA, 20 bp, Artificial sequence
  Synthetic oligonucleotide
gtgtaaatagtgacttgtac

SEQ ID NO: 450 - DNA, 20 bp, Artificial sequence
  Synthetic oligonucleotide
tgaggcacaggaaagttaac

SEQ ID NO: 451 - DNA, 20 bp, Artificial sequence
  Synthetic oligonucleotide
agctatagttctccattagg

SEQ ID NO: 452 - DNA, 20 bp, Artificial sequence
  Synthetic oligonucleotide
ttacttgctgactaagccat

SEQ ID NO: 453 - DNA, 20 bp, Artificial sequence
  Synthetic oligonucleotide
gtttgtcaactcaacatcaa

SEQ ID NO: 454 - DNA, 20 bp, Artificial sequence
  Synthetic oligonucleotide
gactatttgtatatatatac

SEQ ID NO: 455 - DNA, 20 bp, Artificial sequence
  Synthetic oligonucleotide
atgactatttgtatatatat

SEQ ID NO: 456 - DNA, 20 bp, Artificial sequence
  Synthetic oligonucleotide
actcttccttatatttgctc

SEQ ID NO: 457 - DNA, 20 bp, Artificial sequence
  Synthetic oligonucleotide
atacactgacttttaacatt

SEQ ID NO: 458 - DNA, 20 bp, Artificial sequence
  Synthetic oligonucleotide
cttagaaacagtagtttcat

SEQ ID NO: 459 - DNA, 20 bp, Artificial sequence
  Synthetic oligonucleotide
ctgagctttgccttaagaat

SEQ ID NO: 460 - DNA, 20 bp, Artificial sequence
  Synthetic oligonucleotide
caccagacagcaggtagagc

SEQ ID NO: 461 - DNA, 20 bp, Artificial sequence
  Synthetic oligonucleotide
gagatggagtagaaggcaaa

SEQ ID NO: 462 - DNA, 20 bp, Artificial sequence
  Synthetic oligonucleotide
taggaaaggaagaatacact

SEQ ID NO: 463 - DNA, 20 bp, Artificial sequence
  Synthetic oligonucleotide
tagaccaggaagggtgagag

SEQ ID NO: 464 - DNA, 20 bp, Artificial sequence
  Synthetic oligonucleotide
aagttggatctggcatgcat

SEQ ID NO: 465 - DNA, 20 bp, Artificial sequence
  Synthetic oligonucleotide
aaagttggatctggcatgca

SEQ ID NO: 466 - DNA, 20 bp, Artificial sequence
  Synthetic oligonucleotide
ccataactcttctaactggg

SEQ ID NO: 467 - DNA, 20 bp, Artificial sequence
  Synthetic oligonucleotide
atattaaagtttgagaacta

SEQ ID NO: 468 - DNA, 20 bp, Artificial sequence
  Synthetic oligonucleotide
cttaactacaaaatgctgga

SEQ ID NO: 469 - DNA, 20 bp, Artificial sequence
  Synthetic oligonucleotide
tgagcagctgtcctcagttc

SEQ ID NO: 470 - DNA, 20 bp, Artificial sequence
  Synthetic oligonucleotide
gagttcataaaagttttact

SEQ ID NO: 471 - DNA, 20 bp, Artificial sequence
  Synthetic oligonucleotide
ctatccacaccattccataa

SEQ ID NO: 472 - DNA, 20 bp, Artificial sequence
  Synthetic oligonucleotide
aacatctaagtaatgcaaac

SEQ ID NO: 473 - DNA, 20 bp, Artificial sequence
  Synthetic oligonucleotide
tttgcattcaaagccctggg

SEQ ID NO: 474 - DNA, 20 bp, Artificial sequence
  Synthetic oligonucleotide
tccatattataggctatgat

SEQ ID NO: 475 - DNA, 20 bp, Artificial sequence
  Synthetic oligonucleotide
attttatgataatgtaaaac

SEQ ID NO: 476 - DNA, 20 bp, Artificial sequence
  Synthetic oligonucleotide
gagatcacattttctgagta

SEQ ID NO: 477 - DNA, 20 bp, Artificial sequence
  Synthetic oligonucleotide
acctccctaggattacctca

SEQ ID NO: 478 - DNA, 20 bp, Artificial sequence
  Synthetic oligonucleotide
aaaatctgatttataatcaa

SEQ ID NO: 479 - DNA, 20 bp, Artificial sequence
  Synthetic oligonucleotide
agcatagattttgacttccc

SEQ ID NO: 480 - DNA, 20 bp, Artificial sequence
  Synthetic oligonucleotide
aaagtcatatacacaggtct

SEQ ID NO: 481 - DNA, 20 bp, Artificial sequence
  Synthetic oligonucleotide
ctcatagcaaattcccagaa

SEQ ID NO: 482 - DNA, 20 bp, Artificial sequence
  Synthetic oligonucleotide
caacatggaggctagcatgt

SEQ ID NO: 483 - DNA, 20 bp, Artificial sequence
  Synthetic oligonucleotide
agactaagtggcctgaatgt

SEQ ID NO: 484 - DNA, 20 bp, Artificial sequence
  Synthetic oligonucleotide
acctaccatgtcactctcaa

SEQ ID NO: 485 - DNA, 20 bp, Artificial sequence
  Synthetic oligonucleotide
aactttcttgtgttttatca

SEQ ID NO: 486 - DNA, 20 bp, Artificial sequence
  Synthetic oligonucleotide
tttgcaagacaaagaaatga

SEQ ID NO: 487 - DNA, 20 bp, Artificial sequence
  Synthetic oligonucleotide
catgcaaagtgttcctcttc

SEQ ID NO: 488 - DNA, 20 bp, Artificial sequence
  Synthetic oligonucleotide
agtgctttgctttctcttat

SEQ ID NO: 489 - DNA, 20 bp, Artificial sequence
  Synthetic oligonucleotide
gaacaagaaacacttggtaa

SEQ ID NO: 490 - DNA, 20 bp, Artificial sequence
  Synthetic oligonucleotide
agtgttccaattaaatggca

SEQ ID NO: 491 - DNA, 20 bp, Artificial sequence
  Synthetic oligonucleotide
aaacaatgcccttgtagtga

SEQ ID NO: 492 - DNA, 20 bp, Artificial sequence
  Synthetic oligonucleotide
tattctaggttttgaggtga

SEQ ID NO: 493 - DNA, 20 bp, Artificial sequence
  Synthetic oligonucleotide
atattctaggttttgaggtg

SEQ ID NO: 494 - DNA, 20 bp, Artificial sequence
  Synthetic oligonucleotide
gttttccattctttaagaaa

SEQ ID NO: 495 - DNA, 20 bp, Artificial sequence
  Synthetic oligonucleotide
agcaatccattgattgtatg

SEQ ID NO: 496 - DNA, 20 bp, Artificial sequence
  Synthetic oligonucleotide
aattatggcaaaatggaaaa

SEQ ID NO: 497 - DNA, 20 bp, Artificial sequence
  Synthetic oligonucleotide
acatttgcttatgagactat

SEQ ID NO: 498 - DNA, 20 bp, Artificial sequence
  Synthetic oligonucleotide
gcagagataatcctatgatg

SEQ ID NO: 499 - DNA, 20 bp, Artificial sequence
  Synthetic oligonucleotide
tccatctgttacctctctgt

SEQ ID NO: 500 - DNA, 20 bp, Artificial sequence
  Synthetic oligonucleotide
tttgcctgaagggcagaacc

SEQ ID NO: 501 - DNA, 20 bp, Artificial sequence
  Synthetic oligonucleotide
gaaaaaatcagattttcaca

SEQ ID NO: 502 - DNA, 20 bp, Artificial sequence
  Synthetic oligonucleotide
aacttaatttaatcatttct

SEQ ID NO: 503 - DNA, 20 bp, Artificial sequence
  Synthetic oligonucleotide
tttggttgtcatgagttgag

SEQ ID NO: 504 - DNA, 20 bp, Artificial sequence
  Synthetic oligonucleotide
ttccatctctagggcacttt

SEQ ID NO: 505 - DNA, 20 bp, Artificial sequence
  Synthetic oligonucleotide
agagcttattttcaaaattc

SEQ ID NO: 506 - DNA, 20 bp, Artificial sequence
  Synthetic oligonucleotide
ataaagagcaaacaaacata

SEQ ID NO: 507 - DNA, 20 bp, Artificial sequence
  Synthetic oligonucleotide
tataaattccttggtctgat

SEQ ID NO: 508 - DNA, 20 bp, Artificial sequence
  Synthetic oligonucleotide
aaaatataaattccttggtc

SEQ ID NO: 509 - DNA, 20 bp, Artificial sequence
  Synthetic oligonucleotide
ttttataacagcctctgaca

SEQ ID NO: 510 - DNA, 20 bp, Artificial sequence
  Synthetic oligonucleotide
aaaagaccatgttgcttatt

SEQ ID NO: 511 - DNA, 20 bp, Artificial sequence
  Synthetic oligonucleotide
atagtcagtcagaatgtggt

SEQ ID NO: 512 - DNA, 20 bp, Artificial sequence
  Synthetic oligonucleotide
tgccttagcttggaaaagac

SEQ ID NO: 513 - DNA, 20 bp, Artificial sequence
  Synthetic oligonucleotide
agggctagctgatgcctctc

SEQ ID NO: 514 - DNA, 20 bp, Artificial sequence
  Synthetic oligonucleotide
ttggactgggctcaaacaga

SEQ ID NO: 515 - DNA, 20 bp, Artificial sequence
  Synthetic oligonucleotide
aaagtcaggctagagggact

SEQ ID NO: 516 - DNA, 20 bp, Artificial sequence
  Synthetic oligonucleotide
tccttgttttcttgtaatga

SEQ ID NO: 517 - DNA, 20 bp, Artificial sequence
  Synthetic oligonucleotide
acaccagaggaaggaaatca

SEQ ID NO: 518 - DNA, 20 bp, Artificial sequence
  Synthetic oligonucleotide
gatgtacaccattttgaatt

SEQ ID NO: 519 - DNA, 20 bp, Artificial sequence
  Synthetic oligonucleotide
tgctctggcctagcctatgt

SEQ ID NO: 520 - DNA, 20 bp, Artificial sequence
  Synthetic oligonucleotide
cagaggtgtctcccaagaaa

SEQ ID NO: 521 - DNA, 20 bp, Artificial sequence
  Synthetic oligonucleotide
aaagagaatggatcaaagct

SEQ ID NO: 522 - DNA, 20 bp, Artificial sequence
  Synthetic oligonucleotide
gatttgcagaacaaatcttg

SEQ ID NO: 523 - DNA, 20 bp, Artificial sequence
  Synthetic oligonucleotide
tggttatgaaggttggacca

SEQ ID NO: 524 - DNA, 20 bp, Artificial sequence
  Synthetic oligonucleotide
tggctaattaatgggcaatt

SEQ ID NO: 525 - DNA, 20 bp, Artificial sequence
  Synthetic oligonucleotide
ctgtgccatattgcctctaa

SEQ ID NO: 526 - DNA, 20 bp, Artificial sequence
  Synthetic oligonucleotide
gatttcaaccagctcacctg

SEQ ID NO: 527 - DNA, 20 bp, Artificial sequence
  Synthetic oligonucleotide
gcaaaagggaaccctgaagc

SEQ ID NO: 528 - DNA, 20 bp, Artificial sequence
  Synthetic oligonucleotide
ctaagtgttataacaaacac

SEQ ID NO: 529 - DNA, 20 bp, Artificial sequence
  Synthetic oligonucleotide
gtccattggtataaaactca

SEQ ID NO: 530 - DNA, 20 bp, Artificial sequence
  Synthetic oligonucleotide
tttcaatacaataagattta

SEQ ID NO: 531 - DNA, 20 bp, Artificial sequence
  Synthetic oligonucleotide
gtccttagacccctcaatgg

SEQ ID NO: 532 - DNA, 20 bp, Artificial sequence
  Synthetic oligonucleotide
gaggatttattcatctaggc

SEQ ID NO: 533 - DNA, 20 bp, Artificial sequence
  Synthetic oligonucleotide
cagtgggaggatcagatatc

SEQ ID NO: 534 - DNA, 20 bp, Artificial sequence
  Synthetic oligonucleotide
atcccatccagcagctggac

SEQ ID NO: 535 - DNA, 20 bp, Artificial sequence
  Synthetic oligonucleotide
aacttgggatgagttactga

SEQ ID NO: 536 - DNA, 20 bp, Artificial sequence
  Synthetic oligonucleotide
gaaggctacctaaaagaaat

SEQ ID NO: 537 - DNA, 20 bp, Artificial sequence
  Synthetic oligonucleotide
aaagaaatattcacaacatt

SEQ ID NO: 538 - DNA, 20 bp, Artificial sequence
  Synthetic oligonucleotide
atgcttatactgctgctgta

SEQ ID NO: 539 - DNA, 20 bp, Artificial sequence
  Synthetic oligonucleotide
tcctcacttcaatcaccttt

SEQ ID NO: 540 - DNA, 20 bp, Artificial sequence
  Synthetic oligonucleotide
ctctttcttcataaataagt

SEQ ID NO: 541 - DNA, 20 bp, Artificial sequence
  Synthetic oligonucleotide
tggtaatctgtgtcccttta

SEQ ID NO: 542 - DNA, 20 bp, Artificial sequence
  Synthetic oligonucleotide
taataaaaaagtttgaaaca

SEQ ID NO: 543 - DNA, 20 bp, Artificial sequence
  Synthetic oligonucleotide
ggtggtggcaagagaaaaat

SEQ ID NO: 544 - DNA, 20 bp, Artificial sequence
  Synthetic oligonucleotide
caaaaggccctttttacatg

SEQ ID NO: 545 - DNA, 20 bp, Artificial sequence
  Synthetic oligonucleotide
actctactggtaccaattta

SEQ ID NO: 546 - DNA, 20 bp, Artificial sequence
  Synthetic oligonucleotide
tctgaacttttatgctctgt

SEQ ID NO: 547 - DNA, 20 bp, Artificial sequence
  Synthetic oligonucleotide
aacttttgcctgggcatcca

SEQ ID NO: 548 - DNA, 20 bp, Artificial sequence
  Synthetic oligonucleotide
tgactccatgtctcacatcc

SEQ ID NO: 549 - DNA, 20 bp, Artificial sequence
  Synthetic oligonucleotide
ttacttcctagatacaacag

SEQ ID NO: 550 - DNA, 20 bp, Artificial sequence
  Synthetic oligonucleotide
ctggcccccatgattcaatt

SEQ ID NO: 551 - DNA, 20 bp, Artificial sequence
  Synthetic oligonucleotide
aagactggcccccatgattc

SEQ ID NO: 552 - DNA, 20 bp, Artificial sequence
  Synthetic oligonucleotide
tgtcactggtctgtgtattt

SEQ ID NO: 553 - DNA, 20 bp, Artificial sequence
  Synthetic oligonucleotide
acagagtagatttagcataa

SEQ ID NO: 554 - DNA, 20 bp, Artificial sequence
  Synthetic oligonucleotide
taaacaggtgtactattaca

SEQ ID NO: 555 - DNA, 20 bp, Artificial sequence
  Synthetic oligonucleotide
gctttatcaactaagtttat

SEQ ID NO: 556 - DNA, 20 bp, Artificial sequence
  Synthetic oligonucleotide
cagaacttcttttaaaattg

SEQ ID NO: 557 - DNA, 20 bp, Artificial sequence
  Synthetic oligonucleotide
gaatacagacataccttgaa

SEQ ID NO: 558 - DNA, 20 bp, Artificial sequence
  Synthetic oligonucleotide
ccatgacaacaatttcagag

SEQ ID NO: 559 - DNA, 20 bp, Artificial sequence
  Synthetic oligonucleotide
acaaatagcaatgaatgggt

SEQ ID NO: 560 - DNA, 20 bp, Artificial sequence
  Synthetic oligonucleotide
caacaaatagcaatgaatgg

SEQ ID NO: 561 - DNA, 20 bp, Artificial sequence
  Synthetic oligonucleotide
gtacacaaatcagtagctct

SEQ ID NO: 562 - DNA, 20 bp, Artificial sequence
  Synthetic oligonucleotide
ctatgtcaaaaagactgaaa

SEQ ID NO: 563 - DNA, 20 bp, Artificial sequence
  Synthetic oligonucleotide
atatacagaacatttcatcc

SEQ ID NO: 564 - DNA, 20 bp, Artificial sequence
  Synthetic oligonucleotide
agaatagataagaactcacc

SEQ ID NO: 565 - DNA, 20 bp, Artificial sequence
  Synthetic oligonucleotide
aggaaagatacagtcatttt

SEQ ID NO: 566 - DNA, 20 bp, Artificial sequence
  Synthetic oligonucleotide
gcacaaagaacacctgggaa

SEQ ID NO: 567 - DNA, 20 bp, Artificial sequence
  Synthetic oligonucleotide
caagaagtctgggattatgt

SEQ ID NO: 568 - DNA, 20 bp, Artificial sequence
  Synthetic oligonucleotide
gttagttattaagctaatca

SEQ ID NO: 569 - DNA, 20 bp, Artificial sequence
  Synthetic oligonucleotide
aaccattatttataggctaa

SEQ ID NO: 570 - DNA, 20 bp, Artificial sequence
  Synthetic oligonucleotide
ccagaatgcgatcacttctt

SEQ ID NO: 571 - DNA, 20 bp, Artificial sequence
  Synthetic oligonucleotide
ccagaaattatcctcctctc

SEQ ID NO: 572 - DNA, 20 bp, Artificial sequence
  Synthetic oligonucleotide
agggaaatgcaaattaaaac

SEQ ID NO: 573 - DNA, 20 bp, Artificial sequence
  Synthetic oligonucleotide
gcatcaagatacagaaaaat

SEQ ID NO: 574 - DNA, 20 bp, Artificial sequence
  Synthetic oligonucleotide
gaatgtttatgagatttttc

SEQ ID NO: 575 - DNA, 20 bp, Artificial sequence
  Synthetic oligonucleotide
gccaattatattgccacatt

SEQ ID NO: 576 - DNA, 20 bp, Artificial sequence
  Synthetic oligonucleotide
atacttgcttatgtagaaat

SEQ ID NO: 577 - DNA, 20 bp, Artificial sequence
  Synthetic oligonucleotide
taatacttgcttatgtagaa

SEQ ID NO: 578 - DNA, 20 bp, Artificial sequence
  Synthetic oligonucleotide
gaacacatggcattctgata

SEQ ID NO: 579 - DNA, 20 bp, Artificial sequence
  Synthetic oligonucleotide
cagaatttgcagtataaatc

SEQ ID NO: 580 - DNA, 20 bp, Artificial sequence
  Synthetic oligonucleotide
tatgttttgaaatcttattt

SEQ ID NO: 581 - DNA, 20 bp, Artificial sequence
  Synthetic oligonucleotide
actcactgctacctcattaa

SEQ ID NO: 582 - DNA, 20 bp, Artificial sequence
  Synthetic oligonucleotide
aagcagtgatagggtatctg

SEQ ID NO: 583 - DNA, 20 bp, Artificial sequence
  Synthetic oligonucleotide
atgaggcctattacaatgga

SEQ ID NO: 584 - DNA, 20 bp, Artificial sequence
  Synthetic oligonucleotide
ctggagtctcatgaggccta

SEQ ID NO: 585 - DNA, 20 bp, Artificial sequence
  Synthetic oligonucleotide
tgactatcagccttttaatc

SEQ ID NO: 586 - DNA, 20 bp, Artificial sequence
  Synthetic oligonucleotide
ttcagagaacaacctttgaa

SEQ ID NO: 587 - DNA, 20 bp, Artificial sequence
  Synthetic oligonucleotide
agccatgtgtgatctgatgt

SEQ ID NO: 588 - DNA, 20 bp, Artificial sequence
  Synthetic oligonucleotide
gaaatttactccaaactagc

SEQ ID NO: 589 - DNA, 20 bp, Artificial sequence
  Synthetic oligonucleotide
aacatccagaccaccatcta

SEQ ID NO: 590 - DNA, 20 bp, Artificial sequence
  Synthetic oligonucleotide
gtaccaaaccattcatgctc

SEQ ID NO: 591 - DNA, 20 bp, Artificial sequence
  Synthetic oligonucleotide
agtaccaaaccattcatgct

SEQ ID NO: 592 - DNA, 20 bp, Artificial sequence
  Synthetic oligonucleotide
ttatagagcttgagattgac

SEQ ID NO: 593 - DNA, 20 bp, Artificial sequence
  Synthetic oligonucleotide
agtccattatagagcttgag

SEQ ID NO: 594 - DNA, 20 bp, Artificial sequence
  Synthetic oligonucleotide
aaccatgagatgcaatgcag

SEQ ID NO: 595 - DNA, 20 bp, Artificial sequence
  Synthetic oligonucleotide
aggattgagaatcgctgatt

SEQ ID NO: 596 - DNA, 20 bp, Artificial sequence
  Synthetic oligonucleotide
tctaaagcatggccaggatt

SEQ ID NO: 597 - DNA, 20 bp, Artificial sequence
  Synthetic oligonucleotide
gggactgagtattgatactt

SEQ ID NO: 598 - DNA, 20 bp, Artificial sequence
  Synthetic oligonucleotide
agaagtagggtgttccagat

SEQ ID NO: 599 - DNA, 20 bp, Artificial sequence
  Synthetic oligonucleotide
agaaatagtcttcctactaa

SEQ ID NO: 600 - DNA, 20 bp, Artificial sequence
  Synthetic oligonucleotide
gcctcctttaagcttctatg

SEQ ID NO: 601 - DNA, 20 bp, Artificial sequence
  Synthetic oligonucleotide
ggcctgcctttactttccca

SEQ ID NO: 602 - DNA, 20 bp, Artificial sequence
  Synthetic oligonucleotide
acctcagtggactctttcca

SEQ ID NO: 603 - DNA, 20 bp, Artificial sequence
  Synthetic oligonucleotide
caaacctaagttcaagtcct

SEQ ID NO: 604 - DNA, 20 bp, Artificial sequence
  Synthetic oligonucleotide
agtttcacttcttgaatcaa

SEQ ID NO: 605 - DNA, 20 bp, Artificial sequence
  Synthetic oligonucleotide
aagatcaaatgaggtcaagg

SEQ ID NO: 606 - DNA, 20 bp, Artificial sequence
  Synthetic oligonucleotide
tagatacaaatttcatcaca

SEQ ID NO: 607 - DNA, 20 bp, Artificial sequence
  Synthetic oligonucleotide
attcctaaaataggagcagg

SEQ ID NO: 608 - DNA, 20 bp, Artificial sequence
  Synthetic oligonucleotide
tttttatgttgtataagata

SEQ ID NO: 609 - DNA, 20 bp, Artificial sequence
  Synthetic oligonucleotide
gttcagccaatacatgagta

SEQ ID NO: 610 - DNA, 20 bp, Artificial sequence
  Synthetic oligonucleotide
ccagagggagttcattacca

SEQ ID NO: 611 - DNA, 20 bp, Artificial sequence
  Synthetic oligonucleotide
tctctctaattcaaccttat

SEQ ID NO: 612 - DNA, 20 bp, Artificial sequence
  Synthetic oligonucleotide
ataatcctcagacctcttta

SEQ ID NO: 613 - DNA, 20 bp, Artificial sequence
  Synthetic oligonucleotide
cactgtggcagaattccaag

SEQ ID NO: 614 - DNA, 20 bp, Artificial sequence
  Synthetic oligonucleotide
acaccttggtgcctagaagc

SEQ ID NO: 615 - DNA, 20 bp, Artificial sequence
  Synthetic oligonucleotide
gtagcaatgacacctaagaa

SEQ ID NO: 616 - DNA, 20 bp, Artificial sequence
  Synthetic oligonucleotide
tttaaaataataaatgctta

SEQ ID NO: 617 - DNA, 20 bp, Artificial sequence
  Synthetic oligonucleotide
tcatttggtccttagacccc

SEQ ID NO: 618 - DNA, 20 bp, Artificial sequence
  Synthetic oligonucleotide
ttattcatctaggccgagtg

SEQ ID NO: 619 - DNA, 20 bp, Artificial sequence
  Synthetic oligonucleotide
ttgcagaatcttctctttgg

SEQ ID NO: 620 - DNA, 20 bp, Artificial sequence
  Synthetic oligonucleotide
accataaagctatgccataa

SEQ ID NO: 621 - DNA, 20 bp, Artificial sequence
  Synthetic oligonucleotide
ggcaaggagcacaataggac

SEQ ID NO: 622 - DNA, 20 bp, Artificial sequence
  Synthetic oligonucleotide
acccaaaaagttgagctgag

SEQ ID NO: 623 - DNA, 20 bp, Artificial sequence
  Synthetic oligonucleotide
tagattttcagactctttct

SEQ ID NO: 624 - DNA, 20 bp, Artificial sequence
  Synthetic oligonucleotide
aatttcaatattgttgtgtt

SEQ ID NO: 625 - DNA, 20 bp, Artificial sequence
  Synthetic oligonucleotide
atgcttttaatggcacccaa

SEQ ID NO: 626 - DNA, 20 bp, Artificial sequence
  Synthetic oligonucleotide
catgtctcacatccaggtca

SEQ ID NO: 627 - DNA, 20 bp, Artificial sequence
  Synthetic oligonucleotide
ttcactggagtagactttta

SEQ ID NO: 628 - DNA, 20 bp, Artificial sequence
  Synthetic oligonucleotide
cttataagggaggtctggta

SEQ ID NO: 629 - DNA, 20 bp, Artificial sequence
  Synthetic oligonucleotide
gcataattcttaagggccct

SEQ ID NO: 630 - DNA, 20 bp, Artificial sequence
  Synthetic oligonucleotide
ccacagaacttcttttaaaa

SEQ ID NO: 631 - DNA, 20 bp, Artificial sequence
  Synthetic oligonucleotide
ggtgaccatgattttaacaa

SEQ ID NO: 632 - DNA, 20 bp, Artificial sequence
  Synthetic oligonucleotide
aacagctgcatgacaatttt

SEQ ID NO: 633 - DNA, 20 bp, Artificial sequence
  Synthetic oligonucleotide
agaaacagaatcagtgactt

SEQ ID NO: 634 - DNA, 20 bp, Artificial sequence
  Synthetic oligonucleotide
cagattccagagaaaagcca

SEQ ID NO: 635 - DNA, 20 bp, Artificial sequence
  Synthetic oligonucleotide
tgtgagaagaactctatcac

SEQ ID NO: 636 - DNA, 20 bp, Artificial sequence
  Synthetic oligonucleotide
ctcacaaatcaccactaaag

SEQ ID NO: 637 - DNA, 20 bp, Artificial sequence
  Synthetic oligonucleotide
caacgagtggataaagaaac

SEQ ID NO: 638 - DNA, 20 bp, Artificial sequence
  Synthetic oligonucleotide
ataaaactggatcctcatct

SEQ ID NO: 639 - DNA, 20 bp, Artificial sequence
  Synthetic oligonucleotide
attaaaactctcagcaaaat

SEQ ID NO: 640 - DNA, 20 bp, Artificial sequence
  Synthetic oligonucleotide
aaagactgaaagaacacaaa

SEQ ID NO: 641 - DNA, 20 bp, Artificial sequence
  Synthetic oligonucleotide
tatctgctgccttcaggaga

SEQ ID NO: 642 - DNA, 20 bp, Artificial sequence
  Synthetic oligonucleotide
tttgaattaacccaattcaa

SEQ ID NO: 643 - DNA, 20 bp, Artificial sequence
  Synthetic oligonucleotide
tcttaatttacaacagagga

SEQ ID NO: 644 - DNA, 20 bp, Artificial sequence
  Synthetic oligonucleotide
agaaaagtgacaggcttccc

SEQ ID NO: 645 - DNA, 20 bp, Artificial sequence
  Synthetic oligonucleotide
atgttccttgaagatcccaa

SEQ ID NO: 646 - DNA, 20 bp, Artificial sequence
  Synthetic oligonucleotide
atgaataacacttgccacaa

SEQ ID NO: 647 - DNA, 20 bp, Artificial sequence
  Synthetic oligonucleotide
gtatgtttatcacagcacag

SEQ ID NO: 648 - DNA, 20 bp, Artificial sequence
  Synthetic oligonucleotide
aaacactgcaatattaggtt

SEQ ID NO: 649 - DNA, 20 bp, Artificial sequence
  Synthetic oligonucleotide
gattggtgcttttcaaactg

SEQ ID NO: 650 - DNA, 20 bp, Artificial sequence
  Synthetic oligonucleotide
atttgtaagacaaacatgaa

SEQ ID NO: 651 - DNA, 20 bp, Artificial sequence
  Synthetic oligonucleotide
tcacatgactatgttctggc

SEQ ID NO: 652 - DNA, 20 bp, Artificial sequence
  Synthetic oligonucleotide
agtcctgtccacactattaa

SEQ ID NO: 653 - DNA, 20 bp, Artificial sequence
  Synthetic oligonucleotide
ctgggctctgcctgctgaac

SEQ ID NO: 654 - DNA, 20 bp, Artificial sequence
  Synthetic oligonucleotide
aaaacccttaagtatttcct

SEQ ID NO: 655 - DNA, 20 bp, Artificial sequence
  Synthetic oligonucleotide
ctctgtttcaaaccccccag

SEQ ID NO: 656 - DNA, 20 bp, Artificial sequence
  Synthetic oligonucleotide
ggacagaacaccaatcacaa

SEQ ID NO: 657 - DNA, 20 bp, Artificial sequence
  Synthetic oligonucleotide
acctacccttcaaagtcacg

SEQ ID NO: 658 - DNA, 20 bp, Artificial sequence
  Synthetic oligonucleotide
ttcagttcccaggaggctta

SEQ ID NO: 659 - DNA, 20 bp, Artificial sequence
  Synthetic oligonucleotide
ttttgcaatgtctagcaatt

SEQ ID NO: 660 - DNA, 20 bp, Artificial sequence
  Synthetic oligonucleotide
attaagatcagaaaatatta

SEQ ID NO: 661 - DNA, 20 bp, Artificial sequence
  Synthetic oligonucleotide
ttaatgagatattttgcacc

SEQ ID NO: 662 - DNA, 20 bp, Artificial sequence
  Synthetic oligonucleotide
gagaggttaagtaaatctcc

SEQ ID NO: 663 - DNA, 20 bp, Artificial sequence
  Synthetic oligonucleotide
cagactcaaatttgaaaatt

SEQ ID NO: 664 - DNA, 20 bp, Artificial sequence
  Synthetic oligonucleotide
gataaggcaataatacagcc

SEQ ID NO: 665 - DNA, 20 bp, Artificial sequence
  Synthetic oligonucleotide
atcatttgccaatttctgtg

SEQ ID NO: 666 - DNA, 20 bp, Artificial sequence
  Synthetic oligonucleotide
caagaagaaaagatgcaaaa

SEQ ID NO: 667 - DNA, 20 bp, Artificial sequence
  Synthetic oligonucleotide
aatttatttccttcctatga

SEQ ID NO: 668 - DNA, 20 bp, Artificial sequence
  Synthetic oligonucleotide
ttttggaaatgtgagaaacg

SEQ ID NO: 669 - DNA, 20 bp, Artificial sequence
  Synthetic oligonucleotide
aaacacatgagaaaagatga

SEQ ID NO: 670 - DNA, 20 bp, Artificial sequence
  Synthetic oligonucleotide
tgttggctcagtgggaatga

SEQ ID NO: 671 - DNA, 20 bp, Artificial sequence
  Synthetic oligonucleotide
tgaacaggtttgcatttctc

SEQ ID NO: 672 - DNA, 20 bp, Artificial sequence
  Synthetic oligonucleotide
tcctaggtgaacaggctatg

SEQ ID NO: 673 - DNA, 20 bp, Artificial sequence
  Synthetic oligonucleotide
ccctaatcaggctgaaataa

SEQ ID NO: 674 - DNA, 20 bp, Artificial sequence
  Synthetic oligonucleotide
agggccagtaaggtttgctt

SEQ ID NO: 675 - DNA, 20 bp, Artificial sequence
  Synthetic oligonucleotide
agcctgaattctgagctctg

SEQ ID NO: 676 - DNA, 20 bp, Artificial sequence
  Synthetic oligonucleotide
agaggatctcagctgcaatt

SEQ ID NO: 677 - DNA, 20 bp, Artificial sequence
  Synthetic oligonucleotide
gaaaatccctgctcaagtgc

SEQ ID NO: 678 - DNA, 20 bp, Artificial sequence
  Synthetic oligonucleotide
tgcctgatattgtaattctt

SEQ ID NO: 679 - DNA, 20 bp, Artificial sequence
  Synthetic oligonucleotide
ctcatacagtgaagtcttca

SEQ ID NO: 680 - DNA, 20 bp, Artificial sequence
  Synthetic oligonucleotide
ctcactaagcttgattcact

SEQ ID NO: 681 - DNA, 20 bp, Artificial sequence
  Synthetic oligonucleotide
gatacagaaatcccagtgac

SEQ ID NO: 682 - DNA, 20 bp, Artificial sequence
  Synthetic oligonucleotide
tgtgcttgggtgtacaggca

SEQ ID NO: 683 - DNA, 20 bp, Artificial sequence
  Synthetic oligonucleotide
tcaagcacttacatcatatg

SEQ ID NO: 684 - DNA, 20 bp, Artificial sequence
  Synthetic oligonucleotide
agggttagttattacactta

SEQ ID NO: 685 - DNA, 20 bp, Artificial sequence
  Synthetic oligonucleotide
aggcttcatgtgaggtaaca

SEQ ID NO: 686 - DNA, 20 bp, Artificial sequence
  Synthetic oligonucleotide
tgaaagcttagtacaagaag

SEQ ID NO: 687 - DNA, 20 bp, Artificial sequence
  Synthetic oligonucleotide
ctctcctcttggagatccag

SEQ ID NO: 688 - DNA, 20 bp, Artificial sequence
  Synthetic oligonucleotide
gctgagatttctctcctctt

SEQ ID NO: 689 - DNA, 20 bp, Artificial sequence
  Synthetic oligonucleotide
cttttgctgagatttctctc

SEQ ID NO: 690 - DNA, 20 bp, Artificial sequence
  Synthetic oligonucleotide
gaacatatgtccatagaatg

SEQ ID NO: 691 - DNA, 20 bp, Artificial sequence
  Synthetic oligonucleotide
gaacaggctatgtaatcaaa

SEQ ID NO: 692 - DNA, 20 bp, Artificial sequence
  Synthetic oligonucleotide
tttttattactgtgcaaacc

SEQ ID NO: 693 - DNA, 20 bp, Artificial sequence
  Synthetic oligonucleotide
actgagggtggaaatggaaa

SEQ ID NO: 694 - DNA, 20 bp, Artificial sequence
  Synthetic oligonucleotide
atgccatacttttcatttca

SEQ ID NO: 695 - DNA, 20 bp, Artificial sequence
  Synthetic oligonucleotide
tctttaaagatttcctatgc

SEQ ID NO: 696 - DNA, 20 bp, Artificial sequence
  Synthetic oligonucleotide
tcacaattaaattatgttta

SEQ ID NO: 697 - DNA, 20 bp, Artificial sequence
  Synthetic oligonucleotide
tttgccatcaccaaacacca

SEQ ID NO: 698 - DNA, 20 bp, Artificial sequence
  Synthetic oligonucleotide
tcagaatgctgaaggatggg

SEQ ID NO: 699 - DNA, 20 bp, Artificial sequence
  Synthetic oligonucleotide
acaattgcaggagagaactg

SEQ ID NO: 700 - DNA, 20 bp, Artificial sequence
  Synthetic oligonucleotide
gttcagtcacctggaaagag

SEQ ID NO: 701 - DNA, 20 bp, Artificial sequence
  Synthetic oligonucleotide
cggagttcagtcacctggaa

SEQ ID NO: 702 - DNA, 20 bp, Artificial sequence
  Synthetic oligonucleotide
aatctaaagttcaatgtcca

SEQ ID NO: 703 - DNA, 20 bp, Artificial sequence
  Synthetic oligonucleotide
ccacctttgggtgaatagca

SEQ ID NO: 704 - DNA, 20 bp, Artificial sequence
  Synthetic oligonucleotide
caacatcaaaagtttccacc

SEQ ID NO: 705 - DNA, 20 bp, Artificial sequence
  Synthetic oligonucleotide
aagcttctatcaaccaactg

SEQ ID NO: 706 - DNA, 20 bp, Artificial sequence
  Synthetic oligonucleotide
accattttctaataattcac

SEQ ID NO: 707 - DNA, 20 bp, Artificial sequence
  Synthetic oligonucleotide
acctgcacttggacaactga

SEQ ID NO: 708 - DNA, 20 bp, Artificial sequence
  Synthetic oligonucleotide
gtcagtgctttggtgatgta

SEQ ID NO: 709 - DNA, 20 bp, Artificial sequence
  Synthetic oligonucleotide
tagaagcacaggaactagag

SEQ ID NO: 710 - DNA, 20 bp, Artificial sequence
  Synthetic oligonucleotide
tttaattttattagaagcac

SEQ ID NO: 711 - DNA, 20 bp, Artificial sequence
  Synthetic oligonucleotide
gagcaagaattaagaaaatc

SEQ ID NO: 712 - DNA, 20 bp, Artificial sequence
  Synthetic oligonucleotide
ctctgcagtcatgtacacaa

SEQ ID NO: 713 - DNA, 20 bp, Artificial sequence
  Synthetic oligonucleotide
gcttggtttgtcaatccttt

SEQ ID NO: 714 - DNA, 20 bp, Artificial sequence
  Synthetic oligonucleotide
gttctcaagcaggagccatt

SEQ ID NO: 715 - DNA, 20 bp, Artificial sequence
  Synthetic oligonucleotide
agggtgatcttccaaaacaa

SEQ ID NO: 716 - DNA, 20 bp, Artificial sequence
  Synthetic oligonucleotide
tctcctatgcttcctttaat

SEQ ID NO: 717 - DNA, 20 bp, Artificial sequence
  Synthetic oligonucleotide
gacataaatatgttcactga

SEQ ID NO: 718 - DNA, 20 bp, Artificial sequence
  Synthetic oligonucleotide
ttactgagtgacagtacagt

SEQ ID NO: 719 - DNA, 20 bp, Artificial sequence
  Synthetic oligonucleotide
ccaggcaccagcacaggcac

SEQ ID NO: 720 - DNA, 20 bp, Artificial sequence
  Synthetic oligonucleotide
ttaatgtcagtagaaagctg

SEQ ID NO: 721 - DNA, 20 bp, Artificial sequence
  Synthetic oligonucleotide
gcaggtggaaagaagatgtc

SEQ ID NO: 722 - DNA, 20 bp, Artificial sequence
  Synthetic oligonucleotide
gccagggtctttacaaagtt

SEQ ID NO: 723 - DNA, 20 bp, Artificial sequence
  Synthetic oligonucleotide
cattacctttgtacatgtac

SEQ ID NO: 724 - DNA, 20 bp, Artificial sequence
  Synthetic oligonucleotide
gaagcaacttctctgaggtc

SEQ ID NO: 725 - DNA, 20 bp, Artificial sequence
  Synthetic oligonucleotide
gcctggcaagaagggccctt

SEQ ID NO: 726 - DNA, 20 bp, Artificial sequence
  Synthetic oligonucleotide
acacatgtttttaaatttat

SEQ ID NO: 727 - DNA, 20 bp, Artificial sequence
  Synthetic oligonucleotide
tcacaatgcactaaaagaaa

SEQ ID NO: 728 - DNA, 20 bp, Artificial sequence
  Synthetic oligonucleotide
tcccaatgacttactgtaga

SEQ ID NO: 729 - DNA, 20 bp, Artificial sequence
  Synthetic oligonucleotide
taagcatttatggaggaatg

SEQ ID NO: 730 - DNA, 20 bp, Artificial sequence
  Synthetic oligonucleotide
tgaggtgggtggccaacagg

SEQ ID NO: 731 - DNA, 20 bp, Artificial sequence
  Synthetic oligonucleotide
gtttttcattttgattgcag

SEQ ID NO: 732 - DNA, 20 bp, Artificial sequence
  Synthetic oligonucleotide
agctcaagtgtttttcattt

SEQ ID NO: 733 - DNA, 20 bp, Artificial sequence
  Synthetic oligonucleotide
caatgtcacagctgtttcct

SEQ ID NO: 734 - DNA, 20 bp, Artificial sequence
  Synthetic oligonucleotide
gaactttggaggcttttaga

SEQ ID NO: 735 - DNA, 20 bp, Artificial sequence
  Synthetic oligonucleotide
tgtatgccccaaactcccat

SEQ ID NO: 736 - DNA, 20 bp, Artificial sequence
  Synthetic oligonucleotide
acacaaataagggaataata

SEQ ID NO: 737 - DNA, 20 bp, Artificial sequence
  Synthetic oligonucleotide
tagttcagccactatggaaa

SEQ ID NO: 738 - DNA, 20 bp, Artificial sequence
  Synthetic oligonucleotide
ctccaaattccagtcctagg

SEQ ID NO: 739 - DNA, 20 bp, Artificial sequence
  Synthetic oligonucleotide
agttggcactgctatatcag

SEQ ID NO: 740 - DNA, 20 bp, Artificial sequence
  Synthetic oligonucleotide
ggccttagattgtaagtttt

SEQ ID NO: 741 - DNA, 20 bp, Artificial sequence
  Synthetic oligonucleotide
ttttagtattattgtaggaa

SEQ ID NO: 742 - DNA, 20 bp, Artificial sequence
  Synthetic oligonucleotide
tttcattaatgaaacctgat

SEQ ID NO: 743 - DNA, 20 bp, Artificial sequence
  Synthetic oligonucleotide
ccctcagctgcctcttcaat

SEQ ID NO: 744 - DNA, 20 bp, Artificial sequence
  Synthetic oligonucleotide
tattgtatcctggcccctaa

SEQ ID NO: 745 - DNA, 20 bp, Artificial sequence
  Synthetic oligonucleotide
agaacaagagcctagaagta

SEQ ID NO: 746 - DNA, 20 bp, Artificial sequence
  Synthetic oligonucleotide
gtgactatgtcactgaattt

SEQ ID NO: 747 - DNA, 20 bp, Artificial sequence
  Synthetic oligonucleotide
gccctacccagcagcctgtg

SEQ ID NO: 748 - DNA, 20 bp, Artificial sequence
  Synthetic oligonucleotide
caaacataaagagagttcca

SEQ ID NO: 749 - DNA, 20 bp, Artificial sequence
  Synthetic oligonucleotide
ctttaaatgaagtagagctc

SEQ ID NO: 750 - DNA, 20 bp, Artificial sequence
  Synthetic oligonucleotide
ctgttcaaagaatgcaggcc

SEQ ID NO: 751 - DNA, 20 bp, Artificial sequence
  Synthetic oligonucleotide
gtctagcctaacagagatat

SEQ ID NO: 752 - DNA, 20 bp, Artificial sequence
  Synthetic oligonucleotide
aaagagtgatgtctagccta

SEQ ID NO: 753 - DNA, 20 bp, Artificial sequence
  Synthetic oligonucleotide
cacttcttactcctttgagg

SEQ ID NO: 754 - DNA, 20 bp, Artificial sequence
  Synthetic oligonucleotide
ttccacaagaaactcagttt

SEQ ID NO: 755 - DNA, 20 bp, Artificial sequence
  Synthetic oligonucleotide
agaaatgccaaagatagctc

SEQ ID NO: 756 - DNA, 20 bp, Artificial sequence
  Synthetic oligonucleotide
agcagaggatctcagctgca

SEQ ID NO: 757 - DNA, 20 bp, Artificial sequence
  Synthetic oligonucleotide
aatccctgctcaagtgctac

SEQ ID NO: 758 - DNA, 20 bp, Artificial sequence
  Synthetic oligonucleotide
aaatccctgctcaagtgcta

SEQ ID NO: 759 - DNA, 20 bp, Artificial sequence
  Synthetic oligonucleotide
aaaatccctgctcaagtgct

SEQ ID NO: 760 - DNA, 20 bp, Artificial sequence
  Synthetic oligonucleotide
agaaaatccctgctcaagtg

SEQ ID NO: 761 - DNA, 20 bp, Artificial sequence
  Synthetic oligonucleotide
aagaaaatccctgctcaagt

SEQ ID NO: 762 - DNA, 20 bp, Artificial sequence
  Synthetic oligonucleotide
caagaaaatccctgctcaag

SEQ ID NO: 763 - DNA, 20 bp, Artificial sequence
  Synthetic oligonucleotide
ctgatattgtaattcttggt

SEQ ID NO: 764 - DNA, 20 bp, Artificial sequence
  Synthetic oligonucleotide
cctgatattgtaattcttgg

SEQ ID NO: 765 - DNA, 20 bp, Artificial sequence
  Synthetic oligonucleotide
gcctgatattgtaattcttg

SEQ ID NO: 766 - DNA, 20 bp, Artificial sequence
  Synthetic oligonucleotide
atgcctgatattgtaattct

SEQ ID NO: 767 - DNA, 20 bp, Artificial sequence
  Synthetic oligonucleotide
aatgcctgatattgtaattc

SEQ ID NO: 768 - DNA, 20 bp, Artificial sequence
  Synthetic oligonucleotide
caatgcctgatattgtaatt

SEQ ID NO: 769 - DNA, 20 bp, Artificial sequence
  Synthetic oligonucleotide
aattatgtgctttgcctgca

SEQ ID NO: 770 - DNA, 20 bp, Artificial sequence
  Synthetic oligonucleotide
caattatgtgctttgcctgc

SEQ ID NO: 771 - DNA, 20 bp, Artificial sequence
  Synthetic oligonucleotide
tcaattatgtgctttgcctg

SEQ ID NO: 772 - DNA, 20 bp, Artificial sequence
  Synthetic oligonucleotide
tgtcaattatgtgctttgcc

SEQ ID NO: 773 - DNA, 20 bp, Artificial sequence
  Synthetic oligonucleotide
atgtcaattatgtgctttgc

SEQ ID NO: 774 - DNA, 20 bp, Artificial sequence
  Synthetic oligonucleotide
gatgtcaattatgtgctttg

SEQ ID NO: 775 - DNA, 20 bp, Artificial sequence
  Synthetic oligonucleotide
ctggtgactctgcctgatga

SEQ ID NO: 776 - DNA, 20 bp, Artificial sequence
  Synthetic oligonucleotide
gctggtgactctgcctgatg

SEQ ID NO: 777 - DNA, 20 bp, Artificial sequence
  Synthetic oligonucleotide
tgctggtgactctgcctgat

SEQ ID NO: 778 - DNA, 20 bp, Artificial sequence
  Synthetic oligonucleotide
gctgctggtgactctgcctg

SEQ ID NO: 779 - DNA, 20 bp, Artificial sequence
  Synthetic oligonucleotide
ggctgctggtgactctgcct

SEQ ID NO: 780 - DNA, 20 bp, Artificial sequence
  Synthetic oligonucleotide
tggctgctggtgactctgcc

SEQ ID NO: 781 - DNA, 20 bp, Artificial sequence
  Synthetic oligonucleotide
gctgaaggatgggcatccag

SEQ ID NO: 782 - DNA, 20 bp, Artificial sequence
  Synthetic oligonucleotide
tgctgaaggatgggcatcca

SEQ ID NO: 783 - DNA, 20 bp, Artificial sequence
  Synthetic oligonucleotide
atgctgaaggatgggcatcc

SEQ ID NO: 784 - DNA, 20 bp, Artificial sequence
  Synthetic oligonucleotide
gaatgctgaaggatgggcat

SEQ ID NO: 785 - DNA, 20 bp, Artificial sequence
  Synthetic oligonucleotide
agaatgctgaaggatgggca

SEQ ID NO: 786 - DNA, 20 bp, Artificial sequence
  Synthetic oligonucleotide
cagaatgctgaaggatgggc

SEQ ID NO: 787 - DNA, 20 bp, Artificial sequence
  Synthetic oligonucleotide
tccagtagtcaatattattt

SEQ ID NO: 788 - DNA, 20 bp, Artificial sequence
  Synthetic oligonucleotide
atccagtagtcaatattatt

SEQ ID NO: 789 - DNA, 20 bp, Artificial sequence
  Synthetic oligonucleotide
tatccagtagtcaatattat

SEQ ID NO: 790 - DNA, 20 bp, Artificial sequence
  Synthetic oligonucleotide
gttatccagtagtcaatatt

SEQ ID NO: 791 - DNA, 20 bp, Artificial sequence
  Synthetic oligonucleotide
ggttatccagtagtcaatat

SEQ ID NO: 792 - DNA, 20 bp, Artificial sequence
  Synthetic oligonucleotide
tggttatccagtagtcaata

SEQ ID NO: 793 - DNA, 20 bp, Artificial sequence
  Synthetic oligonucleotide
caacttgaggacaataagag

SEQ ID NO: 794 - DNA, 20 bp, Artificial sequence
  Synthetic oligonucleotide
tcaacttgaggacaataaga

SEQ ID NO: 795 - DNA, 20 bp, Artificial sequence
  Synthetic oligonucleotide
ctcaacttgaggacaataag

SEQ ID NO: 796 - DNA, 20 bp, Artificial sequence
  Synthetic oligonucleotide
aactcaacttgaggacaata

SEQ ID NO: 797 - DNA, 20 bp, Artificial sequence
  Synthetic oligonucleotide
taactcaacttgaggacaat

SEQ ID NO: 798 - DNA, 20 bp, Artificial sequence
  Synthetic oligonucleotide
ataactcaacttgaggacaa

SEQ ID NO: 799 - DNA, 20 bp, Artificial sequence
  Synthetic oligonucleotide
caggaagaaaggaaccttag

SEQ ID NO: 800 - DNA, 20 bp, Artificial sequence
  Synthetic oligonucleotide
ccaggaagaaaggaacctta

SEQ ID NO: 801 - DNA, 20 bp, Artificial sequence
  Synthetic oligonucleotide
accaggaagaaaggaacctt

SEQ ID NO: 802 - DNA, 20 bp, Artificial sequence
  Synthetic oligonucleotide
agaccaggaagaaaggaacc

SEQ ID NO: 803 - DNA, 20 bp, Artificial sequence
  Synthetic oligonucleotide
tagaccaggaagaaaggaac

SEQ ID NO: 804 - DNA, 20 bp, Artificial sequence
  Synthetic oligonucleotide
atagaccaggaagaaaggaa

SEQ ID NO: 805 - DNA, 20 bp, Artificial sequence
  Synthetic oligonucleotide
tacaatgcacaggacacgcc

SEQ ID NO: 806 - DNA, 20 bp, Artificial sequence
  Synthetic oligonucleotide
ctacaatgcacaggacacgc

SEQ ID NO: 807 - DNA, 20 bp, Artificial sequence
  Synthetic oligonucleotide
gctacaatgcacaggacacg

SEQ ID NO: 808 - DNA, 20 bp, Artificial sequence
  Synthetic oligonucleotide
atgctacaatgcacaggaca

SEQ ID NO: 809 - DNA, 20 bp, Artificial sequence
  Synthetic oligonucleotide
tatgctacaatgcacaggac

SEQ ID NO: 810 - DNA, 20 bp, Artificial sequence
  Synthetic oligonucleotide
atatgctacaatgcacagga

SEQ ID NO: 811 - DNA, 20 bp, Artificial sequence
  Synthetic oligonucleotide
ctgatatttattgctgtacg

SEQ ID NO: 812 - DNA, 20 bp, Artificial sequence
  Synthetic oligonucleotide
ctctgatatttattgctgta

SEQ ID NO: 813 - DNA, 20 bp, Artificial sequence
  Synthetic oligonucleotide
tctctgatatttattgctgt

SEQ ID NO: 814 - DNA, 20 bp, Artificial sequence
  Synthetic oligonucleotide
gtctctgatatttattgctg

SEQ ID NO: 815 - DNA, 20 bp, Artificial sequence
  Synthetic oligonucleotide
ccagaagaattacccatgca

SEQ ID NO: 816 - DNA, 20 bp, Artificial sequence
  Synthetic oligonucleotide
tccagaagaattacccatgc

SEQ ID NO: 817 - DNA, 20 bp, Artificial sequence
  Synthetic oligonucleotide
ttccagaagaattacccatg

SEQ ID NO: 818 - DNA, 20 bp, Artificial sequence
  Synthetic oligonucleotide
tcttccagaagaattaccca

SEQ ID NO: 819 - DNA, 20 bp, Artificial sequence
  Synthetic oligonucleotide
atcttccagaagaattaccc

SEQ ID NO: 820 - DNA, 20 bp, Artificial sequence
  Synthetic oligonucleotide
catcttccagaagaattacc

SEQ ID NO: 821 - DNA, 20 bp, Artificial sequence
  Synthetic oligonucleotide
tttctgcagtatcctagcct

SEQ ID NO: 822 - DNA, 20 bp, Artificial sequence
  Synthetic oligonucleotide
gtttctgcagtatcctagcc

SEQ ID NO: 823 - DNA, 20 bp, Artificial sequence
  Synthetic oligonucleotide
agtttctgcagtatcctagc

SEQ ID NO: 824 - DNA, 20 bp, Artificial sequence
  Synthetic oligonucleotide
tcagtttctgcagtatccta

SEQ ID NO: 825 - DNA, 20 bp, Artificial sequence
  Synthetic oligonucleotide
ttcagtttctgcagtatcct

SEQ ID NO: 826 - DNA, 20 bp, Artificial sequence
  Synthetic oligonucleotide
tttcagtttctgcagtatcc

SEQ ID NO: 827 - DNA, 20 bp, Artificial sequence
  Synthetic oligonucleotide
gtttccattttcttgattcc

SEQ ID NO: 828 - DNA, 20 bp, Artificial sequence
  Synthetic oligonucleotide
tgtttccattttcttgattc

SEQ ID NO: 829 - DNA, 20 bp, Artificial sequence
  Synthetic oligonucleotide
gtgtttccattttcttgatt

SEQ ID NO: 830 - DNA, 20 bp, Artificial sequence
  Synthetic oligonucleotide
tggtgtttccattttcttga

SEQ ID NO: 831 - DNA, 20 bp, Artificial sequence
  Synthetic oligonucleotide
atggtgtttccattttcttg

SEQ ID NO: 832 - DNA, 20 bp, Artificial sequence
  Synthetic oligonucleotide
aatggtgtttccattttctt

SEQ ID NO: 833 - DNA, 20 bp, Artificial sequence
  Synthetic oligonucleotide
aacccatttcatccatttaa

SEQ ID NO: 834 - DNA, 20 bp, Artificial sequence
  Synthetic oligonucleotide
gaacccatttcatccattta

SEQ ID NO: 835 - DNA, 20 bp, Artificial sequence
  Synthetic oligonucleotide
ggaacccatttcatccattt

SEQ ID NO: 836 - DNA, 20 bp, Artificial sequence
  Synthetic oligonucleotide
taggaacccatttcatccat

SEQ ID NO: 837 - DNA, 20 bp, Artificial sequence
  Synthetic oligonucleotide
gtaggaacccatttcatcca

SEQ ID NO: 838 - DNA, 20 bp, Artificial sequence
  Synthetic oligonucleotide
ggtaggaacccatttcatcc

SEQ ID NO: 839 - DNA, 20 bp, Artificial sequence
  Synthetic oligonucleotide
tgagggattgcctcagtagc

SEQ ID NO: 840 - DNA, 20 bp, Artificial sequence
  Synthetic oligonucleotide
ttgagggattgcctcagtag

SEQ ID NO: 841 - DNA, 20 bp, Artificial sequence
  Synthetic oligonucleotide
tttgagggattgcctcagta

SEQ ID NO: 842 - DNA, 20 bp, Artificial sequence
  Synthetic oligonucleotide
cctttgagggattgcctcag

SEQ ID NO: 843 - DNA, 20 bp, Artificial sequence
  Synthetic oligonucleotide
tcctttgagggattgcctca

SEQ ID NO: 844 - DNA, 20 bp, Artificial sequence
  Synthetic oligonucleotide
ctcctttgagggattgcctc

SEQ ID NO: 845 - DNA, 20 bp, Artificial sequence
  Synthetic oligonucleotide
aacttaggacttgggacatt

SEQ ID NO: 846 - DNA, 20 bp, Artificial sequence
  Synthetic oligonucleotide
taacttaggacttgggacat

SEQ ID NO: 847 - DNA, 20 bp, Artificial sequence
  Synthetic oligonucleotide
ctaacttaggacttgggaca

SEQ ID NO: 848 - DNA, 20 bp, Artificial sequence
  Synthetic oligonucleotide
cactaacttaggacttggga

SEQ ID NO: 849 - DNA, 20 bp, Artificial sequence
  Synthetic oligonucleotide
tcactaacttaggacttggg

SEQ ID NO: 850 - DNA, 20 bp, Artificial sequence
  Synthetic oligonucleotide
gtcactaacttaggacttgg

SEQ ID NO: 851 - DNA, 20 bp, Artificial sequence
  Synthetic oligonucleotide
tgggctagatcaggattggt

SEQ ID NO: 852 - DNA, 20 bp, Artificial sequence
  Synthetic oligonucleotide
atgggctagatcaggattgg

SEQ ID NO: 853 - DNA, 20 bp, Artificial sequence
  Synthetic oligonucleotide
catgggctagatcaggattg

SEQ ID NO: 854 - DNA, 20 bp, Artificial sequence
  Synthetic oligonucleotide
accatgggctagatcaggat

SEQ ID NO: 855 - DNA, 20 bp, Artificial sequence
  Synthetic oligonucleotide
taccatgggctagatcagga

SEQ ID NO: 856 - DNA, 20 bp, Artificial sequence
  Synthetic oligonucleotide
ctaccatgggctagatcagg

SEQ ID NO: 857 - DNA, 20 bp, Artificial sequence
  Synthetic oligonucleotide
atgagcttagcagtcactta

SEQ ID NO: 858 - DNA, 20 bp, Artificial sequence
  Synthetic oligonucleotide
catgagcttagcagtcactt

SEQ ID NO: 859 - DNA, 20 bp, Artificial sequence
  Synthetic oligonucleotide
ccatgagcttagcagtcact

SEQ ID NO: 860 - DNA, 20 bp, Artificial sequence
  Synthetic oligonucleotide
gtctcagcaaacctgggata

SEQ ID NO: 861 - DNA, 20 bp, Artificial sequence
  Synthetic oligonucleotide
tgtctcagcaaacctgggat

SEQ ID NO: 862 - DNA, 20 bp, Artificial sequence
  Synthetic oligonucleotide
atgtctcagcaaacctggga

SEQ ID NO: 863 - DNA, 20 bp, Artificial sequence
  Synthetic oligonucleotide
gaatgtctcagcaaacctgg

SEQ ID NO: 864 - DNA, 20 bp, Artificial sequence
  Synthetic oligonucleotide
ggaatgtctcagcaaacctg

SEQ ID NO: 865 - DNA, 20 bp, Artificial sequence
  Synthetic oligonucleotide
aggaatgtctcagcaaacct

SEQ ID NO: 866 - DNA, 20 bp, Artificial sequence
  Synthetic oligonucleotide
tacagacatagctctaacct

SEQ ID NO: 867 - DNA, 20 bp, Artificial sequence
  Synthetic oligonucleotide
atacagacatagctctaacc

SEQ ID NO: 868 - DNA, 20 bp, Artificial sequence
  Synthetic oligonucleotide
gatacagacatagctctaac

SEQ ID NO: 869 - DNA, 20 bp, Artificial sequence
  Synthetic oligonucleotide
tggatacagacatagctcta

SEQ ID NO: 870 - DNA, 20 bp, Artificial sequence
  Synthetic oligonucleotide
ctggatacagacatagctct

SEQ ID NO: 871 - DNA, 20 bp, Artificial sequence
  Synthetic oligonucleotide
gctggatacagacatagctc

SEQ ID NO: 872 - DNA, 20 bp, Artificial sequence
  Synthetic oligonucleotide
acactgtttgtgagggtcaa

SEQ ID NO: 873 - DNA, 20 bp, Artificial sequence
  Synthetic oligonucleotide
aacactgtttgtgagggtca

SEQ ID NO: 874 - DNA, 20 bp, Artificial sequence
  Synthetic oligonucleotide
caacactgtttgtgagggtc

SEQ ID NO: 875 - DNA, 20 bp, Artificial sequence
  Synthetic oligonucleotide
aacaacactgtttgtgaggg

SEQ ID NO: 876 - DNA, 20 bp, Artificial sequence
  Synthetic oligonucleotide
aaacaacactgtttgtgagg

SEQ ID NO: 877 - DNA, 20 bp, Artificial sequence
  Synthetic oligonucleotide
caaacaacactgtttgtgag

SEQ ID NO: 878 - DNA, 20 bp, Artificial sequence
  Synthetic oligonucleotide
ttcaagtttaggatctgcag

SEQ ID NO: 879 - DNA, 20 bp, Artificial sequence
  Synthetic oligonucleotide
cttcaagtttaggatctgca

SEQ ID NO: 880 - DNA, 20 bp, Artificial sequence
  Synthetic oligonucleotide
gcttcaagtttaggatctgc

SEQ ID NO: 881 - DNA, 20 bp, Artificial sequence
  Synthetic oligonucleotide
gggcttcaagtttaggatct

SEQ ID NO: 882 - DNA, 20 bp, Artificial sequence
  Synthetic oligonucleotide
agggcttcaagtttaggatc

SEQ ID NO: 883 - DNA, 20 bp, Artificial sequence
  Synthetic oligonucleotide
cagggcttcaagtttaggat

SEQ ID NO: 884 - DNA, 20 bp, Artificial sequence
  Synthetic oligonucleotide
tgtggctttaattcactaat

SEQ ID NO: 885 - DNA, 20 bp, Artificial sequence
  Synthetic oligonucleotide
atgtggctttaattcactaa

SEQ ID NO: 886 - DNA, 20 bp, Artificial sequence
  Synthetic oligonucleotide
tatgtggctttaattcacta

SEQ ID NO: 887 - DNA, 20 bp, Artificial sequence
  Synthetic oligonucleotide
ggtatgtggctttaattcac

SEQ ID NO: 888 - DNA, 20 bp, Artificial sequence
  Synthetic oligonucleotide
tggtatgtggctttaattca

SEQ ID NO: 889 - DNA, 20 bp, Artificial sequence
  Synthetic oligonucleotide
gtggtatgtggctttaattc

SEQ ID NO: 890 - DNA, 20 bp, Artificial sequence
  Synthetic oligonucleotide
tctgtgttcagttgcatcac

SEQ ID NO: 891 - DNA, 20 bp, Artificial sequence
  Synthetic oligonucleotide
ttctgtgttcagttgcatca

SEQ ID NO: 892 - DNA, 20 bp, Artificial sequence
  Synthetic oligonucleotide
gttctgtgttcagttgcatc

SEQ ID NO: 893 - DNA, 20 bp, Artificial sequence
  Synthetic oligonucleotide
gtactcatgaggaggcactt

SEQ ID NO: 894 - DNA, 20 bp, Artificial sequence
  Synthetic oligonucleotide
ggtactcatgaggaggcact

SEQ ID NO: 895 - DNA, 20 bp, Artificial sequence
  Synthetic oligonucleotide
tggtactcatgaggaggcac

SEQ ID NO: 896 - DNA, 20 bp, Artificial sequence
  Synthetic oligonucleotide
attggtactcatgaggaggc

SEQ ID NO: 897 - DNA, 20 bp, Artificial sequence
  Synthetic oligonucleotide
aattggtactcatgaggagg

SEQ ID NO: 898 - DNA, 20 bp, Artificial sequence
  Synthetic oligonucleotide
caattggtactcatgaggag

SEQ ID NO: 899 - DNA, 20 bp, Artificial sequence
  Synthetic oligonucleotide
aaactctgcaactccaaccc

SEQ ID NO: 900 - DNA, 20 bp, Artificial sequence
  Synthetic oligonucleotide
gaaactctgcaactccaacc

SEQ ID NO: 901 - DNA, 20 bp, Artificial sequence
  Synthetic oligonucleotide
ggaaactctgcaactccaac

SEQ ID NO: 902 - DNA, 20 bp, Artificial sequence
  Synthetic oligonucleotide
atggaaactctgcaactcca

SEQ ID NO: 903 - DNA, 20 bp, Artificial sequence
  Synthetic oligonucleotide
catggaaactctgcaactcc

SEQ ID NO: 904 - DNA, 20 bp, Artificial sequence
  Synthetic oligonucleotide
tcatggaaactctgcaactc

SEQ ID NO: 905 - DNA, 20 bp, Artificial sequence
  Synthetic oligonucleotide
acatctggatgtgaggctcg

SEQ ID NO: 906 - DNA, 20 bp, Artificial sequence
  Synthetic oligonucleotide
cacatctggatgtgaggctc

SEQ ID NO: 907 - DNA, 20 bp, Artificial sequence
  Synthetic oligonucleotide
gtcacatctggatgtgaggc

SEQ ID NO: 908 - DNA, 20 bp, Artificial sequence
  Synthetic oligonucleotide
tgtcacatctggatgtgagg

SEQ ID NO: 909 - DNA, 20 bp, Artificial sequence
  Synthetic oligonucleotide
ctgtcacatctggatgtgag

SEQ ID NO: 910 - DNA, 20 bp, Artificial sequence
  Synthetic oligonucleotide
gtcaattatgtgctttgcct

SEQ ID NO: 911 - DNA, 20 bp, Artificial sequence
  Synthetic oligonucleotide
acattcaaaattcttccttg

SEQ ID NO: 912 - DNA, 20 bp, Artificial sequence
  Synthetic oligonucleotide
atcctgcatatattttattg

SEQ ID NO: 913 - DNA, 20 bp, Artificial sequence
  Synthetic oligonucleotide
ctgctggtgactctgcctga

SEQ ID NO: 914 - DNA, 20 bp, Artificial sequence
  Synthetic oligonucleotide
aatgctgaaggatgggcatc

SEQ ID NO: 915 - DNA, 20 bp, Artificial sequence
  Synthetic oligonucleotide
ttatccagtagtcaatatta

SEQ ID NO: 916 - DNA, 20 bp, Artificial sequence
  Synthetic oligonucleotide
tctcatgttaaagttcttaa

SEQ ID NO: 917 - DNA, 20 bp, Artificial sequence
  Synthetic oligonucleotide
tgcacttggacaactgatag

SEQ ID NO: 918 - DNA, 20 bp, Artificial sequence
  Synthetic oligonucleotide
actcaacttgaggacaataa

SEQ ID NO: 919 - DNA, 20 bp, Artificial sequence
  Synthetic oligonucleotide
gaccaggaagaaaggaacct

SEQ ID NO: 920 - DNA, 20 bp, Artificial sequence
  Synthetic oligonucleotide
tgctacaatgcacaggacac

SEQ ID NO: 921 - DNA, 20 bp, Artificial sequence
  Synthetic oligonucleotide
tctgatatttattgctgtac

SEQ ID NO: 922 - DNA, 20 bp, Artificial sequence
  Synthetic oligonucleotide
atgcttcctttaataaatgt

SEQ ID NO: 923 - DNA, 20 bp, Artificial sequence
  Synthetic oligonucleotide
aacatttagaacctaggaga

SEQ ID NO: 924 - DNA, 20 bp, Artificial sequence
  Synthetic oligonucleotide
caagcttgcaagtaggaaaa

SEQ ID NO: 925 - DNA, 20 bp, Artificial sequence
  Synthetic oligonucleotide
ccaggctgttcatgccaagg

SEQ ID NO: 926 - DNA, 20 bp, Artificial sequence
  Synthetic oligonucleotide
cctgccaagggcaagccagg

SEQ ID NO: 927 - DNA, 20 bp, Artificial sequence
  Synthetic oligonucleotide
tttcacctggtgactggaag

SEQ ID NO: 928 - DNA, 20 bp, Artificial sequence
  Synthetic oligonucleotide
attttctaccatcaaagaga

SEQ ID NO: 929 - DNA, 20 bp, Artificial sequence
  Synthetic oligonucleotide
gattaagttttctttaaaaa

SEQ ID NO: 930 - DNA, 20 bp, Artificial sequence
  Synthetic oligonucleotide
cttccagaagaattacccat

SEQ ID NO: 931 - DNA, 20 bp, Artificial sequence
  Synthetic oligonucleotide
cagtttctgcagtatcctag

SEQ ID NO: 932 - DNA, 20 bp, Artificial sequence
  Synthetic oligonucleotide
tattttgaaaatgagattca

SEQ ID NO: 933 - DNA, 20 bp, Artificial sequence
  Synthetic oligonucleotide
gtggcccgagtaaagataaa

SEQ ID NO: 934 - DNA, 20 bp, Artificial sequence
  Synthetic oligonucleotide
cctgtcaatcctcttatatg

SEQ ID NO: 935 - DNA, 20 bp, Artificial sequence
  Synthetic oligonucleotide
ggtgtttccattttcttgat

SEQ ID NO: 936 - DNA, 20 bp, Artificial sequence
  Synthetic oligonucleotide
acagggtcaaaagttcactt

SEQ ID NO: 937 - DNA, 20 bp, Artificial sequence
  Synthetic oligonucleotide
taggaaagctgagagaatcc

SEQ ID NO: 938 - DNA, 20 bp, Artificial sequence
  Synthetic oligonucleotide
agcatatgaaaaaatactca

SEQ ID NO: 939 - DNA, 20 bp, Artificial sequence
  Synthetic oligonucleotide
cttcagaaatcagcatctga

SEQ ID NO: 940 - DNA, 20 bp, Artificial sequence
  Synthetic oligonucleotide
ttacaagtgacagtgtttgt

SEQ ID NO: 941 - DNA, 20 bp, Artificial sequence
  Synthetic oligonucleotide
atcagaccctgaagaattta

SEQ ID NO: 942 - DNA, 20 bp, Artificial sequence
  Synthetic oligonucleotide
aggaacccatttcatccatt

SEQ ID NO: 943 - DNA, 20 bp, Artificial sequence
  Synthetic oligonucleotide
cacattggtaacttaaagtt

SEQ ID NO: 944 - DNA, 20 bp, Artificial sequence
  Synthetic oligonucleotide
tattatctgactcatttctg

SEQ ID NO: 945 - DNA, 20 bp, Artificial sequence
  Synthetic oligonucleotide
aaataagacaaagaaaattc

SEQ ID NO: 946 - DNA, 20 bp, Artificial sequence
  Synthetic oligonucleotide
ttttaaaaataaccaattca

SEQ ID NO: 947 - DNA, 20 bp, Artificial sequence
  Synthetic oligonucleotide
ctttgagggattgcctcagt

SEQ ID NO: 948 - DNA, 20 bp, Artificial sequence
  Synthetic oligonucleotide
acagtcctcatgaacagatt

SEQ ID NO: 949 - DNA, 20 bp, Artificial sequence
  Synthetic oligonucleotide
actatcattaataatattgt

SEQ ID NO: 950 - DNA, 20 bp, Artificial sequence
  Synthetic oligonucleotide
atctagatttgccttataag

SEQ ID NO: 951 - DNA, 20 bp, Artificial sequence
  Synthetic oligonucleotide
tggttgaggaagacagtctc

SEQ ID NO: 952 - DNA, 20 bp, Artificial sequence
  Synthetic oligonucleotide
tggctcataacttccttagc

SEQ ID NO: 953 - DNA, 20 bp, Artificial sequence
  Synthetic oligonucleotide
actaacttaggacttgggac

SEQ ID NO: 954 - DNA, 20 bp, Artificial sequence
  Synthetic oligonucleotide
cttatagcattactaagtgg

SEQ ID NO: 955 - DNA, 20 bp, Artificial sequence
  Synthetic oligonucleotide
tggtggcaggagagagggaa

SEQ ID NO: 956 - DNA, 20 bp, Artificial sequence
  Synthetic oligonucleotide
tttgccaggaaatcttgaaa

SEQ ID NO: 957 - DNA, 20 bp, Artificial sequence
  Synthetic oligonucleotide
ataacttttctctgaaattt

SEQ ID NO: 958 - DNA, 20 bp, Artificial sequence
  Synthetic oligonucleotide
ccatgggctagatcaggatt

SEQ ID NO: 959 - DNA, 20 bp, Artificial sequence
  Synthetic oligonucleotide
tgagcttagcagtcacttag

SEQ ID NO: 960 - DNA, 20 bp, Artificial sequence
  Synthetic oligonucleotide
aatgtctcagcaaacctggg

SEQ ID NO: 961 - DNA, 20 bp, Artificial sequence
  Synthetic oligonucleotide
ggatacagacatagctctaa

SEQ ID NO: 962 - DNA, 20 bp, Artificial sequence
  Synthetic oligonucleotide
acaacactgtttgtgagggt

SEQ ID NO: 963 - DNA, 20 bp, Artificial sequence
  Synthetic oligonucleotide
tctattttctaatagctgtt

SEQ ID NO: 964 - DNA, 20 bp, Artificial sequence
  Synthetic oligonucleotide
ggccccacctctgaccttca

SEQ ID NO: 965 - DNA, 20 bp, Artificial sequence
  Synthetic oligonucleotide
tggtaaagctagaaaaaaaa

SEQ ID NO: 966 - DNA, 20 bp, Artificial sequence
  Synthetic oligonucleotide
aagtggtaaatatgatcaca

SEQ ID NO: 967 - DNA, 20 bp, Artificial sequence
  Synthetic oligonucleotide
ggcttcaagtttaggatctg

SEQ ID NO: 968 - DNA, 20 bp, Artificial sequence
  Synthetic oligonucleotide
ttgttgacactctcttttgg

SEQ ID NO: 969 - DNA, 20 bp, Artificial sequence
  Synthetic oligonucleotide
gtatgtggctttaattcact

SEQ ID NO: 970 - DNA, 20 bp, Artificial sequence
  Synthetic oligonucleotide
aattagttgttttggcaaat

SEQ ID NO: 971 - DNA, 20 bp, Artificial sequence
  Synthetic oligonucleotide
ctgtgttcagttgcatcacg

SEQ ID NO: 972 - DNA, 20 bp, Artificial sequence
  Synthetic oligonucleotide
aatgtggaagtttcctaaca

SEQ ID NO: 973 - DNA, 20 bp, Artificial sequence
  Synthetic oligonucleotide
ttggtactcatgaggaggca

SEQ ID NO: 974 - DNA, 20 bp, Artificial sequence
  Synthetic oligonucleotide
tttctctgtgtttaaaattg

SEQ ID NO: 975 - DNA, 20 bp, Artificial sequence
  Synthetic oligonucleotide
gtaaagcacaatgaacaaaa

SEQ ID NO: 976 - DNA, 20 bp, Artificial sequence
  Synthetic oligonucleotide
atcacagatctttgctacaa

SEQ ID NO: 977 - DNA, 20 bp, Artificial sequence
  Synthetic oligonucleotide
tcctgcctttctgaaccaaa

SEQ ID NO: 978 - DNA, 20 bp, Artificial sequence
  Synthetic oligonucleotide
tggaaactctgcaactccaa

SEQ ID NO: 979 - DNA, 20 bp, Artificial sequence
  Synthetic oligonucleotide
acacagtagggaacaatttt

SEQ ID NO: 980 - DNA, 20 bp, Artificial sequence
  Synthetic oligonucleotide
agacagatggtgaaatgatg

SEQ ID NO: 981 - DNA, 20 bp, Artificial sequence
  Synthetic oligonucleotide
aaacagaaagagaagaaaac

SEQ ID NO: 982 - DNA, 20 bp, Artificial sequence
  Synthetic oligonucleotide
cttagataaatacttcaaga

SEQ ID NO: 983 - DNA, 20 bp, Artificial sequence
  Synthetic oligonucleotide
agccacttcttttacaacct

SEQ ID NO: 984 - DNA, 20 bp, Artificial sequence
  Synthetic oligonucleotide
tcacatctggatgtgaggct

SEQ ID NO: 985 - DNA, 20 bp, Artificial sequence
  Synthetic oligonucleotide
gactgaaacttaaaggtggg

SEQ ID NO: 986 - DNA, 20 bp, Artificial sequence
  Synthetic oligonucleotide
aaagatgtgcaatcatctaa

SEQ ID NO: 987 - DNA, 17 bp, Artificial sequence
  Synthetic oligonucleotide
gctggtgactctgcctg

SEQ ID NO: 988 - DNA, 17 bp, Artificial sequence
  Synthetic oligonucleotide
tgctggtgactctgcct

SEQ ID NO: 989 - DNA, 17 bp, Artificial sequence
  Synthetic oligonucleotide
ctgctggtgactctgcc

SEQ ID NO: 990 - DNA, 17 bp, Artificial sequence
  Synthetic oligonucleotide
agtagtcaatattattt

SEQ ID NO: 991 - DNA, 17 bp, Artificial sequence
  Synthetic oligonucleotide
cagtagtcaatattatt

SEQ ID NO: 992 - DNA, 17 bp, Artificial sequence
  Synthetic oligonucleotide
ccagtagtcaatattat

SEQ ID NO: 993 - DNA, 17 bp, Artificial sequence
  Synthetic oligonucleotide
cctttgggtgaatagca

SEQ ID NO: 994 - DNA, 17 bp, Artificial sequence
  Synthetic oligonucleotide
acctttgggtgaatagc

SEQ ID NO: 995 - DNA, 17 bp, Artificial sequence
  Synthetic oligonucleotide
cacctttgggtgaatag

SEQ ID NO: 996 - DNA, 17 bp, Artificial sequence
  Synthetic oligonucleotide
caacttgaggacaataa

SEQ ID NO: 997 - DNA, 17 bp, Artificial sequence
  Synthetic oligonucleotide
tcaacttgaggacaata

SEQ ID NO: 998 - DNA, 17 bp, Artificial sequence
  Synthetic oligonucleotide
ctcaacttgaggacaat

SEQ ID NO: 999 - DNA, 17 bp, Artificial sequence
  Synthetic oligonucleotide
caggaagaaaggaacct

SEQ ID NO: 1000 - DNA, 17 bp, Artificial sequence
  Synthetic oligonucleotide
ccaggaagaaaggaacc

SEQ ID NO: 1001 - DNA, 17 bp, Artificial sequence
  Synthetic oligonucleotide
accaggaagaaaggaac

SEQ ID NO: 1002 - DNA, 17 bp, Artificial sequence
  Synthetic oligonucleotide
tgcagtcatgtacacaa

SEQ ID NO: 1003 - DNA, 17 bp, Artificial sequence
  Synthetic oligonucleotide
ctgcagtcatgtacaca

SEQ ID NO: 1004 - DNA, 17 bp, Artificial sequence
  Synthetic oligonucleotide
tctgcagtcatgtacac

SEQ ID NO: 1005 - DNA, 17 bp, Artificial sequence
  Synthetic oligonucleotide
tggtttgtcaatccttt

SEQ ID NO: 1006 - DNA, 17 bp, Artificial sequence
  Synthetic oligonucleotide
ttggtttgtcaatcctt

SEQ ID NO: 1007 - DNA, 17 bp, Artificial sequence
  Synthetic oligonucleotide
cttggtttgtcaatcct

SEQ ID NO: 1008 - DNA, 17 bp, Artificial sequence
  Synthetic oligonucleotide
tacaatgcacaggacac

SEQ ID NO: 1009 - DNA, 17 bp, Artificial sequence
  Synthetic oligonucleotide
ctacaatgcacaggaca

SEQ ID NO: 1010 - DNA, 17 bp, Artificial sequence
  Synthetic oligonucleotide
gctacaatgcacaggac

SEQ ID NO: 1011 - DNA, 17 bp, Artificial sequence
  Synthetic oligonucleotide
gatatttattgctgtac

SEQ ID NO: 1012 - DNA, 17 bp, Artificial sequence
  Synthetic oligonucleotide
tgatatttattgctgta

SEQ ID NO: 1013 - DNA, 17 bp, Artificial sequence
  Synthetic oligonucleotide
ctgatatttattgctgt

SEQ ID NO: 1014 - DNA, 17 bp, Artificial sequence
  Synthetic oligonucleotide
agggtctttacaaagtt

SEQ ID NO: 1015 - DNA, 17 bp, Artificial sequence
  Synthetic oligonucleotide
cagggtctttacaaagt

SEQ ID NO: 1016 - DNA, 17 bp, Artificial sequence
  Synthetic oligonucleotide
ccagggtctttacaaag

SEQ ID NO: 1017 - DNA, 17 bp, Artificial sequence
  Synthetic oligonucleotide
ttctgcagtatcctagc

SEQ ID NO: 1018 - DNA, 17 bp, Artificial sequence
  Synthetic oligonucleotide
tttctgcagtatcctag

SEQ ID NO: 1019 - DNA, 17 bp, Artificial sequence
  Synthetic oligonucleotide
gtttctgcagtatccta

SEQ ID NO: 1020 - DNA, 17 bp, Artificial sequence
  Synthetic oligonucleotide
agtttctgcagtatcct

SEQ ID NO: 1021 - DNA, 17 bp, Artificial sequence
  Synthetic oligonucleotide
cagtttctgcagtatcc

SEQ ID NO: 1022 - DNA, 17 bp, Artificial sequence
  Synthetic oligonucleotide
caaattccagtcctagg

SEQ ID NO: 1023 - DNA, 17 bp, Artificial sequence
  Synthetic oligonucleotide
ccaaattccagtcctag

SEQ ID NO: 1024 - DNA, 17 bp, Artificial sequence
  Synthetic oligonucleotide
tccaaattccagtccta

SEQ ID NO: 1025 - DNA, 17 bp, Artificial sequence
  Synthetic oligonucleotide
aacccatttcatccatt

SEQ ID NO: 1026 - DNA, 17 bp, Artificial sequence
  Synthetic oligonucleotide
gaacccatttcatccat

SEQ ID NO: 1027 - DNA, 17 bp, Artificial sequence
  Synthetic oligonucleotide
ggaacccatttcatcca

SEQ ID NO: 1028 - DNA, 17 bp, Artificial sequence
  Synthetic oligonucleotide
gcttcatgtctttctag

SEQ ID NO: 1029 - DNA, 17 bp, Artificial sequence
  Synthetic oligonucleotide
tgcttcatgtctttcta

SEQ ID NO: 1030 - DNA, 17 bp, Artificial sequence
  Synthetic oligonucleotide
gtgcttcatgtctttct

SEQ ID NO: 1031 - DNA, 17 bp, Artificial sequence
  Synthetic oligonucleotide
tgagcttagcagtcact

SEQ ID NO: 1032 - DNA, 17 bp, Artificial sequence
  Synthetic oligonucleotide
catgagcttagcagtca

SEQ ID NO: 1033 - DNA, 17 bp, Artificial sequence
  Synthetic oligonucleotide
tacagacatagctctaa

SEQ ID NO: 1034 - DNA, 17 bp, Artificial sequence
  Synthetic oligonucleotide
atacagacatagctcta

SEQ ID NO: 1035 - DNA, 17 bp, Artificial sequence
  Synthetic oligonucleotide
gatacagacatagctct

SEQ ID NO: 1036 - DNA, 17 bp, Artificial sequence
  Synthetic oligonucleotide
tgtggctttaattcact

SEQ ID NO: 1037 - DNA, 17 bp, Artificial sequence
  Synthetic oligonucleotide
atgtggctttaattcac

SEQ ID NO: 1038 - DNA, 17 bp, Artificial sequence
  Synthetic oligonucleotide
tatgtggctttaattca

SEQ ID NO: 1039 - DNA, 17 bp, Artificial sequence
  Synthetic oligonucleotide
tgttcagttgcatcacg

SEQ ID NO: 1040 - DNA, 17 bp, Artificial sequence
  Synthetic oligonucleotide
gtgttcagttgcatcac

SEQ ID NO: 1041 - DNA, 17 bp, Artificial sequence
  Synthetic oligonucleotide
tgtgttcagttgcatca

SEQ ID NO: 1042 - DNA, 17 bp, Artificial sequence
  Synthetic oligonucleotide
catctggatgtgaggct

SEQ ID NO: 1043 - DNA, 17 bp, Artificial sequence
  Synthetic oligonucleotide
acatctggatgtgaggc

SEQ ID NO: 1044 - DNA, 17 bp, Artificial sequence
  Synthetic oligonucleotide
cacatctggatgtgagg

SEQ ID NO: 1045 - DNA, 17 bp, Artificial sequence
  Synthetic oligonucleotide
tcaggtaatttctggaa

SEQ ID NO: 1046 - DNA, 17 bp, Artificial sequence
  Synthetic oligonucleotide
ctcaggtaatttctgga

SEQ ID NO: 1047 - DNA, 17 bp, Artificial sequence
  Synthetic oligonucleotide
tctcaggtaatttctgg

SEQ ID NO: 1048 - DNA, 17 bp, Artificial sequence
  Synthetic oligonucleotide
ttgcttatttacctggg

SEQ ID NO: 1049 - DNA, 17 bp, Artificial sequence
  Synthetic oligonucleotide
tttgcttatttacctgg

SEQ ID NO: 1050 - DNA, 17 bp, Artificial sequence
  Synthetic oligonucleotide
ttttgcttatttacctg

SEQ ID NO: 1051 - DNA, 17 bp, Artificial sequence
  Synthetic oligonucleotide
atgatgttactactact

SEQ ID NO: 1052 - DNA, 17 bp, Artificial sequence
  Synthetic oligonucleotide
aatgatgttactactac

SEQ ID NO: 1053 - DNA, 17 bp, Artificial sequence
  Synthetic oligonucleotide
caatgatgttactacta

SEQ ID NO: 1054 - DNA, 17 bp, Artificial sequence
  Synthetic oligonucleotide
cccctagagcaatggtc

SEQ ID NO: 1055 - DNA, 17 bp, Artificial sequence
  Synthetic oligonucleotide
ccccctagagcaatggt

SEQ ID NO: 1056 - DNA, 17 bp, Artificial sequence
  Synthetic oligonucleotide
tccccctagagcaatgg

SEQ ID NO: 1057 - DNA, 17 bp, Artificial sequence
  Synthetic oligonucleotide
tcaattgcagatgctct

SEQ ID NO: 1058 - DNA, 17 bp, Artificial sequence
  Synthetic oligonucleotide
ctcaattgcagatgctc

SEQ ID NO: 1059 - DNA, 17 bp, Artificial sequence
  Synthetic oligonucleotide
gctcaattgcagatgct

SEQ ID NO: 1060 - DNA, 17 bp, Artificial sequence
  Synthetic oligonucleotide
agctcaattgcagatgc

SEQ ID NO: 1061 - DNA, 17 bp, Artificial sequence
  Synthetic oligonucleotide
gtatattcagtccaagg

SEQ ID NO: 1062 - DNA, 17 bp, Artificial sequence
  Synthetic oligonucleotide
agtatattcagtccaag

SEQ ID NO: 1063 - DNA, 17 bp, Artificial sequence
  Synthetic oligonucleotide
cagtatattcagtccaa

SEQ ID NO: 1064 - DNA, 20 bp, Artificial sequence
  Synthetic oligonucleotide
gagtatttcaggctggaaaa

SEQ ID NO: 1065 - DNA, 20 bp, Artificial sequence
  Synthetic oligonucleotide
gtaactcaggaatggaaaac

SEQ ID NO: 1066 - DNA, 20 bp, Artificial sequence
  Synthetic oligonucleotide
agtaactcaggaatggaaaa

SEQ ID NO: 1067 - DNA, 20 bp, Artificial sequence
  Synthetic oligonucleotide
aagtaactcaggaatggaaa

SEQ ID NO: 1068 - DNA, 20 bp, Artificial sequence
  Synthetic oligonucleotide
gagatttcaaataaatctca

SEQ ID NO: 1069 - DNA, 20 bp, Artificial sequence
  Synthetic oligonucleotide
tgagatttcaaataaatctc

SEQ ID NO: 1070 - DNA, 20 bp, Artificial sequence
  Synthetic oligonucleotide
gtgagatttcaaataaatct

SEQ ID NO: 1071 - DNA, 20 bp, Artificial sequence
  Synthetic oligonucleotide
tgtgagatttcaaataaatc

SEQ ID NO: 1072 - DNA, 20 bp, Artificial sequence
  Synthetic oligonucleotide
ttgtgagatttcaaataaat

SEQ ID NO: 1073 - DNA, 20 bp, Artificial sequence
  Synthetic oligonucleotide
tttgtgagatttcaaataaa

SEQ ID NO: 1074 - DNA, 20 bp, Artificial sequence
  Synthetic oligonucleotide
ctttgtgagatttcaaataa

SEQ ID NO: 1075 - DNA, 20 bp, Artificial sequence
  Synthetic oligonucleotide
actttgtgagatttcaaata

SEQ ID NO: 1076 - DNA, 20 bp, Artificial sequence
  Synthetic oligonucleotide
cactttgtgagatttcaaat

SEQ ID NO: 1077 - DNA, 20 bp, Artificial sequence
  Synthetic oligonucleotide
agtatttcaggctggaaaaa

SEQ ID NO: 1078 - DNA, 20 bp, Artificial sequence
  Synthetic oligonucleotide
tgagtatttcaggctggaaa

SEQ ID NO: 1079 - DNA, 20 bp, Artificial sequence
  Synthetic oligonucleotide
tctgagtatttcaggctgga

SEQ ID NO: 1080 - DNA, 20 bp, Artificial sequence
  Synthetic oligonucleotide
atctgagtatttcaggctgg

SEQ ID NO: 1081 - DNA, 20 bp, Artificial sequence
  Synthetic oligonucleotide
tatctgagtatttcaggctg

SEQ ID NO: 1082 - DNA, 20 bp, Artificial sequence
  Synthetic oligonucleotide
ttttgtgttatgccttgagg

SEQ ID NO: 1083 - DNA, 20 bp, Artificial sequence
  Synthetic oligonucleotide
tttttgtgttatgccttgag

SEQ ID NO: 1084 - DNA, 20 bp, Artificial sequence
  Synthetic oligonucleotide
atttttgtgttatgccttga

SEQ ID NO: 1085 - DNA, 20 bp, Artificial sequence
  Synthetic oligonucleotide
atatttttgtgttatgcctt

SEQ ID NO: 1086 - DNA, 20 bp, Artificial sequence
  Synthetic oligonucleotide
aatatttttgtgttatgcct

SEQ ID NO: 1087 - DNA, 20 bp, Artificial sequence
  Synthetic oligonucleotide
aaatatttttgtgttatgcc

SEQ ID NO: 1088 - DNA, 20 bp, Artificial sequence
  Synthetic oligonucleotide
ttgcttatttacctgggtaa

SEQ ID NO: 1089 - DNA, 20 bp, Artificial sequence
  Synthetic oligonucleotide
tttgcttatttacctgggta

SEQ ID NO: 1090 - DNA, 20 bp, Artificial sequence
  Synthetic oligonucleotide
ttttgcttatttacctgggt

SEQ ID NO: 1091 - DNA, 20 bp, Artificial sequence
  Synthetic oligonucleotide
ccttttgcttatttacctgg

SEQ ID NO: 1092 - DNA, 20 bp, Artificial sequence
  Synthetic oligonucleotide
gccttttgcttatttacctg

SEQ ID NO: 1093 - DNA, 20 bp, Artificial sequence
  Synthetic oligonucleotide
tgccttttgcttatttacct

SEQ ID NO: 1094 - DNA, 20 bp, Artificial sequence
  Synthetic oligonucleotide
atgatgttactactactcaa

SEQ ID NO: 1095 - DNA, 20 bp, Artificial sequence
  Synthetic oligonucleotide
aatgatgttactactactca

SEQ ID NO: 1096 - DNA, 20 bp, Artificial sequence
  Synthetic oligonucleotide
caatgatgttactactactc

SEQ ID NO: 1097 - DNA, 20 bp, Artificial sequence
  Synthetic oligonucleotide
tccaatgatgttactactac

SEQ ID NO: 1098 - DNA, 20 bp, Artificial sequence
  Synthetic oligonucleotide
ttccaatgatgttactacta

SEQ ID NO: 1099 - DNA, 20 bp, Artificial sequence
  Synthetic oligonucleotide
attccaatgatgttactact

SEQ ID NO: 1100 - DNA, 20 bp, Artificial sequence
  Synthetic oligonucleotide
cccctagagcaatggtctag

SEQ ID NO: 1101 - DNA, 20 bp, Artificial sequence
  Synthetic oligonucleotide
ccccctagagcaatggtcta

SEQ ID NO: 1102 - DNA, 20 bp, Artificial sequence
  Synthetic oligonucleotide
tccccctagagcaatggtct

SEQ ID NO: 1103 - DNA, 20 bp, Artificial sequence
  Synthetic oligonucleotide
tatccccctagagcaatggt

SEQ ID NO: 1104 - DNA, 20 bp, Artificial sequence
  Synthetic oligonucleotide
atatccccctagagcaatgg

SEQ ID NO: 1105 - DNA, 20 bp, Artificial sequence
  Synthetic oligonucleotide
aatatccccctagagcaatg

SEQ ID NO: 1106 - DNA, 20 bp, Artificial sequence
  Synthetic oligonucleotide
gctcacatttggaagacagt

SEQ ID NO: 1107 - DNA, 20 bp, Artificial sequence
  Synthetic oligonucleotide
ggctcacatttggaagacag

SEQ ID NO: 1108 - DNA, 20 bp, Artificial sequence
  Synthetic oligonucleotide
aggctcacatttggaagaca

SEQ ID NO: 1109 - DNA, 20 bp, Artificial sequence
  Synthetic oligonucleotide
agaggctcacatttggaaga

SEQ ID NO: 1110 - DNA, 20 bp, Artificial sequence
  Synthetic oligonucleotide
tagaggctcacatttggaag

SEQ ID NO: 1111 - DNA, 20 bp, Artificial sequence
  Synthetic oligonucleotide
ttagaggctcacatttggaa

SEQ ID NO: 1112 - DNA, 20 bp, Artificial sequence
  Synthetic oligonucleotide
ctcaattgcagatgctctga

SEQ ID NO: 1113 - DNA, 20 bp, Artificial sequence
  Synthetic oligonucleotide
gctcaattgcagatgctctg

SEQ ID NO: 1114 - DNA, 20 bp, Artificial sequence
  Synthetic oligonucleotide
agctcaattgcagatgctct

SEQ ID NO: 1115 - DNA, 20 bp, Artificial sequence
  Synthetic oligonucleotide
aaagctcaattgcagatgct

SEQ ID NO: 1116 - DNA, 20 bp, Artificial sequence
  Synthetic oligonucleotide
taaagctcaattgcagatgc

SEQ ID NO: 1117 - DNA, 20 bp, Artificial sequence
  Synthetic oligonucleotide
ataaagctcaattgcagatg

SEQ ID NO: 1118 - DNA, 20 bp, Artificial sequence
  Synthetic oligonucleotide
gtgagtccattaaacctctt

SEQ ID NO: 1119 - DNA, 20 bp, Artificial sequence
  Synthetic oligonucleotide
tgtgagtccattaaacctct

SEQ ID NO: 1120 - DNA, 20 bp, Artificial sequence
  Synthetic oligonucleotide
actgtgagtccattaaacct

SEQ ID NO: 1121 - DNA, 20 bp, Artificial sequence
  Synthetic oligonucleotide
aactgtgagtccattaaacc

SEQ ID NO: 1122 - DNA, 20 bp, Artificial sequence
  Synthetic oligonucleotide
gaactgtgagtccattaaac

SEQ ID NO: 1123 - DNA, 20 bp, Artificial sequence
  Synthetic oligonucleotide
atattgaaaggcccatcaaa

SEQ ID NO: 1124 - DNA, 20 bp, Artificial sequence
  Synthetic oligonucleotide
aatattgaaaggcccatcaa

SEQ ID NO: 1125 - DNA, 20 bp, Artificial sequence
  Synthetic oligonucleotide
aaatattgaaaggcccatca

SEQ ID NO: 1126 - DNA, 20 bp, Artificial sequence
  Synthetic oligonucleotide
gaaaatattgaaaggcccat

SEQ ID NO: 1127 - DNA, 20 bp, Artificial sequence
  Synthetic oligonucleotide
ggaaaatattgaaaggccca

SEQ ID NO: 1128 - DNA, 20 bp, Artificial sequence
  Synthetic oligonucleotide
aggaaaatattgaaaggccc

SEQ ID NO: 1129 - DNA, 20 bp, Artificial sequence
  Synthetic oligonucleotide
gtatattcagtccaaggatc

SEQ ID NO: 1130 - DNA, 20 bp, Artificial sequence
  Synthetic oligonucleotide
agtatattcagtccaaggat

SEQ ID NO: 1131 - DNA, 20 bp, Artificial sequence
  Synthetic oligonucleotide
cagtatattcagtccaagga

SEQ ID NO: 1132 - DNA, 20 bp, Artificial sequence
  Synthetic oligonucleotide
aacagtatattcagtccaag

SEQ ID NO: 1133 - DNA, 20 bp, Artificial sequence
  Synthetic oligonucleotide
aaacagtatattcagtccaa

SEQ ID NO: 1134 - DNA, 20 bp, Artificial sequence
  Synthetic oligonucleotide
aaaacagtatattcagtcca

SEQ ID NO: 1135 - DNA, 20 bp, Artificial sequence
  Synthetic oligonucleotide
tctattgttgccacctttat

SEQ ID NO: 1136 - DNA, 20 bp, Artificial sequence
  Synthetic oligonucleotide
ttctattgttgccaccttta

SEQ ID NO: 1137 - DNA, 20 bp, Artificial sequence
  Synthetic oligonucleotide
tttctattgttgccaccttt

SEQ ID NO: 1138 - DNA, 20 bp, Artificial sequence
  Synthetic oligonucleotide
agtttctattgttgccacct

SEQ ID NO: 1139 - DNA, 20 bp, Artificial sequence
  Synthetic oligonucleotide
cagtttctattgttgccacc

SEQ ID NO: 1140 - DNA, 20 bp, Artificial sequence
  Synthetic oligonucleotide
ccagtttctattgttgccac

SEQ ID NO: 1141 - DNA, 20 bp, Artificial sequence
  Synthetic oligonucleotide
gcagaactgattgcttactt

SEQ ID NO: 1142 - DNA, 20 bp, Artificial sequence
  Synthetic oligonucleotide
aggtcataagattttcattt

SEQ ID NO: 1143 - DNA, 20 bp, Artificial sequence
  Synthetic oligonucleotide
gcctctggccataaagaaat

SEQ ID NO: 1144 - DNA, 20 bp, Artificial sequence
  Synthetic oligonucleotide
aaagtttaagaggcacccca

SEQ ID NO: 1145 - DNA, 20 bp, Artificial sequence
  Synthetic oligonucleotide
gaataagcacaaaagtttaa

SEQ ID NO: 1146 - DNA, 20 bp, Artificial sequence
  Synthetic oligonucleotide
gaaccaaataaacctctctt

SEQ ID NO: 1147 - DNA, 20 bp, Artificial sequence
  Synthetic oligonucleotide
atgttgaaatttgatcccca

SEQ ID NO: 1148 - DNA, 20 bp, Artificial sequence
  Synthetic oligonucleotide
tgtgagagctcactcactat

SEQ ID NO: 1149 - DNA, 20 bp, Artificial sequence
  Synthetic oligonucleotide
cttgtgagagctcactcact

SEQ ID NO: 1150 - DNA, 20 bp, Artificial sequence
  Synthetic oligonucleotide
acatggtggcaggagagagg

SEQ ID NO: 1151 - DNA, 20 bp, Artificial sequence
  Synthetic oligonucleotide
ctagaaagaaactacctgag

SEQ ID NO: 1152 - DNA, 20 bp, Artificial sequence
  Synthetic oligonucleotide
aacttcagttgtaaaataat

SEQ ID NO: 1153 - DNA, 20 bp, Artificial sequence
  Synthetic oligonucleotide
gaaaaggattttgagatttc

SEQ ID NO: 1154 - DNA, 20 bp, Artificial sequence
  Synthetic oligonucleotide
cttagctgtcaaggcccttt

SEQ ID NO: 1155 - DNA, 20 bp, Artificial sequence
  Synthetic oligonucleotide
tgtgcttcatgtctttctag

SEQ ID NO: 1156 - DNA, 20 bp, Artificial sequence
  Synthetic oligonucleotide
cccttgaacatgctatcctt

SEQ ID NO: 1157 - DNA, 20 bp, Artificial sequence
  Synthetic oligonucleotide
cttgcagggatgcatctcag

SEQ ID NO: 1158 - DNA, 20 bp, Artificial sequence
  Synthetic oligonucleotide
tctcttgcacatctaatttc

SEQ ID NO: 1159 - DNA, 20 bp, Artificial sequence
  Synthetic oligonucleotide
cttccagcacaacccatcac

SEQ ID NO: 1160 - DNA, 20 bp, Artificial sequence
  Synthetic oligonucleotide
gtaactacattccctttatc

SEQ ID NO: 1161 - DNA, 20 bp, Artificial sequence
  Synthetic oligonucleotide
agtaactacattccctttat

SEQ ID NO: 1162 - DNA, 20 bp, Artificial sequence
  Synthetic oligonucleotide
cagatagcacagggctaaaa

SEQ ID NO: 1163 - DNA, 20 bp, Artificial sequence
  Synthetic oligonucleotide
agaatcaggaatgtttgcct

SEQ ID NO: 1164 - DNA, 20 bp, Artificial sequence
  Synthetic oligonucleotide
tgactcaatcatttagactt

SEQ ID NO: 1165 - DNA, 20 bp, Artificial sequence
  Synthetic oligonucleotide
tcaacagtcaatggacttgt

SEQ ID NO: 1166 - DNA, 20 bp, Artificial sequence
  Synthetic oligonucleotide
aatttctactgctatgatgc

SEQ ID NO: 1167 - DNA, 20 bp, Artificial sequence
  Synthetic oligonucleotide
atggttccaaatttctatct

SEQ ID NO: 1168 - DNA, 20 bp, Artificial sequence
  Synthetic oligonucleotide
ctgtatggctttaagtattc

SEQ ID NO: 1169 - DNA, 20 bp, Artificial sequence
  Synthetic oligonucleotide
aacttatgaactgttcacca

SEQ ID NO: 1170 - DNA, 20 bp, Artificial sequence
  Synthetic oligonucleotide
aataagcttgaagtctgaag

SEQ ID NO: 1171 - DNA, 20 bp, Artificial sequence
  Synthetic oligonucleotide
tagttatctaactgcccaat

SEQ ID NO: 1172 - DNA, 20 bp, Artificial sequence
  Synthetic oligonucleotide
ttctgcaaagcttcccagta

SEQ ID NO: 1173 - DNA, 20 bp, Artificial sequence
  Synthetic oligonucleotide
acaacttcaagcttcacata

SEQ ID NO: 1174 - DNA, 20 bp, Artificial sequence
  Synthetic oligonucleotide
gaatcaatgttctggcaaga

SEQ ID NO: 1175 - DNA, 20 bp, Artificial sequence
  Synthetic oligonucleotide
cagcctttcagctgtgaaag

SEQ ID NO: 1176 - DNA, 20 bp, Artificial sequence
  Synthetic oligonucleotide
aacaatgccaagaaatctat

SEQ ID NO: 1177 - DNA, 20 bp, Artificial sequence
  Synthetic oligonucleotide
cccacagtaacaatgccaag

SEQ ID NO: 1178 - DNA, 20 bp, Artificial sequence
  Synthetic oligonucleotide
ttttacctcccagtgaaact

SEQ ID NO: 1179 - DNA, 20 bp, Artificial sequence
  Synthetic oligonucleotide
taattgttgatccatgatgt

SEQ ID NO: 1180 - DNA, 20 bp, Artificial sequence
  Synthetic oligonucleotide
gttggagagacaagtttaac

SEQ ID NO: 1181 - DNA, 20 bp, Artificial sequence
  Synthetic oligonucleotide
agtcataaaattcaaattat

SEQ ID NO: 1182 - DNA, 20 bp, Artificial sequence
  Synthetic oligonucleotide
ggccttgggcacactttctc

SEQ ID NO: 1183 - DNA, 20 bp, Artificial sequence
  Synthetic oligonucleotide
aagtttttattgaagttaat

SEQ ID NO: 1184 - DNA, 20 bp, Artificial sequence
  Synthetic oligonucleotide
aagaaaaattaggaagctag

SEQ ID NO: 1185 - DNA, 20 bp, Artificial sequence
  Synthetic oligonucleotide
cagggagataagtttattca

SEQ ID NO: 1186 - DNA, 20 bp, Artificial sequence
  Synthetic oligonucleotide
atttaatacacattggaata

SEQ ID NO: 1187 - DNA, 20 bp, Artificial sequence
  Synthetic oligonucleotide
gtaggactatttatgattcc

SEQ ID NO: 1188 - DNA, 20 bp, Artificial sequence
  Synthetic oligonucleotide
cactctcttgggctgttaag

SEQ ID NO: 1189 - DNA, 20 bp, Artificial sequence
  Synthetic oligonucleotide
ttgtttgagttccaaaagaa

SEQ ID NO: 1190 - DNA, 20 bp, Artificial sequence
  Synthetic oligonucleotide
tttgccatgagacacacaat

SEQ ID NO: 1191 - DNA, 20 bp, Artificial sequence
  Synthetic oligonucleotide
caccaaacctcagagacatg

SEQ ID NO: 1192 - DNA, 20 bp, Artificial sequence
  Synthetic oligonucleotide
ccactgttaagtgatgcatg

SEQ ID NO: 1193 - DNA, 20 bp, Artificial sequence
  Synthetic oligonucleotide
ctctcaggtaatttctggaa

SEQ ID NO: 1194 - DNA, 20 bp, Artificial sequence
  Synthetic oligonucleotide
gctcctcacaatgacccttt

SEQ ID NO: 1195 - DNA, 20 bp, Artificial sequence
  Synthetic oligonucleotide
gggactggcactggtaattt

SEQ ID NO: 1196 - DNA, 20 bp, Artificial sequence
  Synthetic oligonucleotide
ctaaccattagttactgtat

SEQ ID NO: 1197 - DNA, 20 bp, Artificial sequence
  Synthetic oligonucleotide
ggattttaggttcttgctgt

SEQ ID NO: 1198 - DNA, 20 bp, Artificial sequence
  Synthetic oligonucleotide
tgaatcatatactgatatca

SEQ ID NO: 1199 - DNA, 20 bp, Artificial sequence
  Synthetic oligonucleotide
ttgaggtattaaattttaaa

SEQ ID NO: 1200 - DNA, 20 bp, Artificial sequence
  Synthetic oligonucleotide
agtttgtaatgtagtgattt

SEQ ID NO: 1201 - DNA, 20 bp, Artificial sequence
  Synthetic oligonucleotide
aaatatttgatagctcacat

SEQ ID NO: 1202 - DNA, 20 bp, Artificial sequence
  Synthetic oligonucleotide
agaaatatttgatagctcac

SEQ ID NO: 1203 - DNA, 20 bp, Artificial sequence
  Synthetic oligonucleotide
ccacatttcaaatgttctct

SEQ ID NO: 1204 - DNA, 20 bp, Artificial sequence
  Synthetic oligonucleotide
gcaggaagagtggcatggac

SEQ ID NO: 1205 - DNA, 20 bp, Artificial sequence
  Synthetic oligonucleotide
cacttatccaaatgcagaga

SEQ ID NO: 1206 - DNA, 20 bp, Artificial sequence
  Synthetic oligonucleotide
caaggtaatgggaggctagc

SEQ ID NO: 1207 - DNA, 20 bp, Artificial sequence
  Synthetic oligonucleotide
atagtcaaagctaaggatat

SEQ ID NO: 1208 - DNA, 20 bp, Artificial sequence
  Synthetic oligonucleotide
gtaatttcattcatgcttcc

SEQ ID NO: 1209 - DNA, 20 bp, Artificial sequence
  Synthetic oligonucleotide
gtccacattcagctgtgtgt

SEQ ID NO: 1210 - DNA, 20 bp, Artificial sequence
  Synthetic oligonucleotide
tcattcaggaaattctgcta

SEQ ID NO: 1211 - DNA, 20 bp, Artificial sequence
  Synthetic oligonucleotide
aacatgtctcattcaggaaa

SEQ ID NO: 1212 - DNA, 20 bp, Artificial sequence
  Synthetic oligonucleotide
taacatgtctcattcaggaa

SEQ ID NO: 1213 - DNA, 20 bp, Artificial sequence
  Synthetic oligonucleotide
agattcctcaaattcagtga

SEQ ID NO: 1214 - DNA, 20 bp, Artificial sequence
  Synthetic oligonucleotide
taagcggaaaaggagaaaag

SEQ ID NO: 1215 - DNA, 20 bp, Artificial sequence
  Synthetic oligonucleotide
aaagcaagagaattcctaaa

SEQ ID NO: 1216 - DNA, 20 bp, Artificial sequence
  Synthetic oligonucleotide
aatgaacctttaacttagta

SEQ ID NO: 1217 - DNA, 20 bp, Artificial sequence
  Synthetic oligonucleotide
aaagctttgtggataaagtt

SEQ ID NO: 1218 - DNA, 20 bp, Artificial sequence
  Synthetic oligonucleotide
gaaggaaaggttctgtggaa

SEQ ID NO: 1219 - DNA, 20 bp, Artificial sequence
  Synthetic oligonucleotide
ctgagtatttcaggctggaa

SEQ ID NO: 1220 - DNA, 20 bp, Artificial sequence
  Synthetic oligonucleotide
ttgaattatccctttaaaaa

SEQ ID NO: 1221 - DNA, 20 bp, Artificial sequence
  Synthetic oligonucleotide
tttagaatggtttggcatac

SEQ ID NO: 1222 - DNA, 20 bp, Artificial sequence
  Synthetic oligonucleotide
gatatgtccacattgattag

SEQ ID NO: 1223 - DNA, 20 bp, Artificial sequence
  Synthetic oligonucleotide
attatttaagcttctacttt

SEQ ID NO: 1224 - DNA, 20 bp, Artificial sequence
  Synthetic oligonucleotide
atacatggcaattaaaagat

SEQ ID NO: 1225 - DNA, 20 bp, Artificial sequence
  Synthetic oligonucleotide
tgagatagtgtgggaaatat

SEQ ID NO: 1226 - DNA, 20 bp, Artificial sequence
  Synthetic oligonucleotide
tatttttgtgttatgccttg

SEQ ID NO: 1227 - DNA, 20 bp, Artificial sequence
  Synthetic oligonucleotide
ttattaactagaatatgcct

SEQ ID NO: 1228 - DNA, 20 bp, Artificial sequence
  Synthetic oligonucleotide
gattattctatttttatttt

SEQ ID NO: 1229 - DNA, 20 bp, Artificial sequence
  Synthetic oligonucleotide
aggaagagtggcatggacat

SEQ ID NO: 1230 - DNA, 20 bp, Artificial sequence
  Synthetic oligonucleotide
cttttgcttatttacctggg

SEQ ID NO: 1231 - DNA, 20 bp, Artificial sequence
  Synthetic oligonucleotide
tttatattattaatatcatt

SEQ ID NO: 1232 - DNA, 20 bp, Artificial sequence
  Synthetic oligonucleotide
ggtacatggcttttaagtgg

SEQ ID NO: 1233 - DNA, 20 bp, Artificial sequence
  Synthetic oligonucleotide
aatattggtcaggtttaaga

SEQ ID NO: 1234 - DNA, 20 bp, Artificial sequence
  Synthetic oligonucleotide
atttcatctctttcttagtt

SEQ ID NO: 1235 - DNA, 20 bp, Artificial sequence
  Synthetic oligonucleotide
ccaatgatgttactactact

SEQ ID NO: 1236 - DNA, 20 bp, Artificial sequence
  Synthetic oligonucleotide
gttcccccaaccccttggaa

SEQ ID NO: 1237 - DNA, 20 bp, Artificial sequence
  Synthetic oligonucleotide
tataggaagtgagatgtatg

SEQ ID NO: 1238 - DNA, 20 bp, Artificial sequence
  Synthetic oligonucleotide
attattctagaagaagattt

SEQ ID NO: 1239 - DNA, 20 bp, Artificial sequence
  Synthetic oligonucleotide
atccccctagagcaatggtc

SEQ ID NO: 1240 - DNA, 20 bp, Artificial sequence
  Synthetic oligonucleotide
gaggctcacatttggaagac

SEQ ID NO: 1241 - DNA, 20 bp, Artificial sequence
  Synthetic oligonucleotide
tacacaaatccaaggcagag

SEQ ID NO: 1242 - DNA, 20 bp, Artificial sequence
  Synthetic oligonucleotide
aggaagagtgggagtgttac

SEQ ID NO: 1243 - DNA, 20 bp, Artificial sequence
  Synthetic oligonucleotide
gtccctgactaggcattttg

SEQ ID NO: 1244 - DNA, 20 bp, Artificial sequence
  Synthetic oligonucleotide
aagctcaattgcagatgctc

SEQ ID NO: 1245 - DNA, 20 bp, Artificial sequence
  Synthetic oligonucleotide
ctgtgagtccattaaacctc

SEQ ID NO: 1246 - DNA, 20 bp, Artificial sequence
  Synthetic oligonucleotide
tgaaatgtggctagtgtgac

SEQ ID NO: 1247 - DNA, 20 bp, Artificial sequence
  Synthetic oligonucleotide
aaaatattgaaaggcccatc

SEQ ID NO: 1248 - DNA, 20 bp, Artificial sequence
  Synthetic oligonucleotide
aatgtcaatagtgccctatt

SEQ ID NO: 1249 - DNA, 20 bp, Artificial sequence
  Synthetic oligonucleotide
acagtatattcagtccaagg

SEQ ID NO: 1250 - DNA, 20 bp, Artificial sequence
  Synthetic oligonucleotide
tgtctatttaagtttgttgc

SEQ ID NO: 1251 - DNA, 20 bp, Artificial sequence
  Synthetic oligonucleotide
ttcaagtactgtcatgaata

SEQ ID NO: 1252 - DNA, 20 bp, Artificial sequence
  Synthetic oligonucleotide
tttctttttcttaaactaag

SEQ ID NO: 1253 - DNA, 20 bp, Artificial sequence
  Synthetic oligonucleotide
gtttctattgttgccacctt

SEQ ID NO: 1254 - DNA, 20 bp, Artificial sequence
  Synthetic oligonucleotide
aaggccacatattatagtat

SEQ ID NO: 1255 - DNA, 20 bp, Artificial sequence
  Synthetic oligonucleotide
acctgaactattaatttctt

SEQ ID NO: 1256 - DNA, 20 bp, Artificial sequence
  Synthetic oligonucleotide
gaatgggctgagtagttgaa

SEQ ID NO: 1257 - DNA, 20 bp, Artificial sequence
  Synthetic oligonucleotide
tgatgaacattgctaatttg

SEQ ID NO: 1258 - DNA, 20 bp, Artificial sequence
  Synthetic oligonucleotide
atcttgcctcgatgaaagtt

SEQ ID NO: 1259 - DNA, 20 bp, Artificial sequence
  Synthetic oligonucleotide
ttaagtggcacagccatgat

SEQ ID NO: 1260 - DNA, 20 bp, Artificial sequence
  Synthetic oligonucleotide
aatgagttaagttggaacac

SEQ ID NO: 1261 - DNA, 20 bp, Artificial sequence
  Synthetic oligonucleotide
tccttagtagaatgcctgga

SEQ ID NO: 1262 - DNA, 20 bp, Artificial sequence
  Synthetic oligonucleotide
tatgtagaaaaataagctgg

SEQ ID NO: 1263 - DNA, 20 bp, Artificial sequence
  Synthetic oligonucleotide
gccgaggcaggcacctgagt

SEQ ID NO: 1264 - DNA, 20 bp, Artificial sequence
  Synthetic oligonucleotide
tggtacctatattgagaggt

SEQ ID NO: 1265 - DNA, 20 bp, Artificial sequence
  Synthetic oligonucleotide
ttaaggaaaaatatagtata

SEQ ID NO: 1266 - DNA, 20 bp, Artificial sequence
  Synthetic oligonucleotide
ttatttatgtgtcagggatg

SEQ ID NO: 1267 - DNA, 20 bp, Artificial sequence
  Synthetic oligonucleotide
caaaagttaagtgctttagg

SEQ ID NO: 1268 - DNA, 20 bp, Artificial sequence
  Synthetic oligonucleotide
ttcatagatgtctaaggaat

SEQ ID NO: 1269 - DNA, 20 bp, Artificial sequence
  Synthetic oligonucleotide
acctgtgatttacctatttc

SEQ ID NO: 1270 - DNA, 20 bp, Artificial sequence
  Synthetic oligonucleotide
tgcctagaaaaccacataaa

SEQ ID NO: 1271 - DNA, 20 bp, Artificial sequence
  Synthetic oligonucleotide
aaacatcctcaaaggtacct

SEQ ID NO: 1272 - DNA, 20 bp, Artificial sequence
  Synthetic oligonucleotide
cttccctgagacacacacat

SEQ ID NO: 1273 - DNA, 20 bp, Artificial sequence
  Synthetic oligonucleotide
cttcttcaatcttctcatac

SEQ ID NO: 1274 - DNA, 20 bp, Artificial sequence
  Synthetic oligonucleotide
taccattttccatttagttt

SEQ ID NO: 1275 - DNA, 20 bp, Artificial sequence
  Synthetic oligonucleotide
attggcatctttttcagtgg

SEQ ID NO: 1276 - DNA, 20 bp, Artificial sequence
  Synthetic oligonucleotide
tcaagctcacggttggagac

SEQ ID NO: 1277 - DNA, 20 bp, Artificial sequence
  Synthetic oligonucleotide
aaatgaaatcagtatgttga

SEQ ID NO: 1278 - DNA, 20 bp, Artificial sequence
  Synthetic oligonucleotide
tgatttatcacaaaggtgct

SEQ ID NO: 1279 - DNA, 20 bp, Artificial sequence
  Synthetic oligonucleotide
aaaacagtagaaaagattaa

SEQ ID NO: 1280 - DNA, 20 bp, Artificial sequence
  Synthetic oligonucleotide
ctacatcacagcagtcagaa

SEQ ID NO: 1281 - DNA, 20 bp, Artificial sequence
  Synthetic oligonucleotide
aaaagatgtaagtgtgacat

SEQ ID NO: 1282 - DNA, 20 bp, Artificial sequence
  Synthetic oligonucleotide
ttacaagaactgctaaaggg

SEQ ID NO: 1283 - DNA, 20 bp, Artificial sequence
  Synthetic oligonucleotide
ataaagaaaaagttaactga

SEQ ID NO: 1284 - DNA, 20 bp, Artificial sequence
  Synthetic oligonucleotide
agataatatacttcttctat

SEQ ID NO: 1285 - DNA, 20 bp, Artificial sequence
  Synthetic oligonucleotide
ccttcttcacatgtaaattg

SEQ ID NO: 1286 - DNA, 20 bp, Artificial sequence
  Synthetic oligonucleotide
tttctatgtagcttgtggtt

SEQ ID NO: 1287 - DNA, 20 bp, Artificial sequence
  Synthetic oligonucleotide
aggcagagtttttattgata

SEQ ID NO: 1288 - DNA, 20 bp, Artificial sequence
  Synthetic oligonucleotide
atagtcaccagcctaagcct

SEQ ID NO: 1289 - DNA, 20 bp, Artificial sequence
  Synthetic oligonucleotide
agacttttagcatgcttgac

SEQ ID NO: 1290 - DNA, 20 bp, Artificial sequence
  Synthetic oligonucleotide
tttacagccctacagttcta

SEQ ID NO: 1291 - DNA, 20 bp, Artificial sequence
  Synthetic oligonucleotide
ccagagaacctgactccaaa

SEQ ID NO: 1292 - DNA, 20 bp, Artificial sequence
  Synthetic oligonucleotide
cagaagaaaatattagacag

SEQ ID NO: 1293 - DNA, 20 bp, Artificial sequence
  Synthetic oligonucleotide
tattatacttctaaattccc

SEQ ID NO: 1294 - DNA, 20 bp, Artificial sequence
  Synthetic oligonucleotide
taaaagcaagaaaaaggaac

SEQ ID NO: 1295 - DNA, 20 bp, Artificial sequence
  Synthetic oligonucleotide
cctaatttatatgaacaaac

SEQ ID NO: 1296 - DNA, 20 bp, Artificial sequence
  Synthetic oligonucleotide
tgcaatgccttagcctaaaa

SEQ ID NO: 1297 - DNA, 20 bp, Artificial sequence
  Synthetic oligonucleotide
caccaccattattacactac

SEQ ID NO: 1298 - DNA, 20 bp, Artificial sequence
  Synthetic oligonucleotide
aaataaatcagattattata

SEQ ID NO: 1299 - DNA, 20 bp, Artificial sequence
  Synthetic oligonucleotide
cttagatctgtgctgtccaa

SEQ ID NO: 1300 - DNA, 20 bp, Artificial sequence
  Synthetic oligonucleotide
gttagtgttagattctttga

SEQ ID NO: 1301 - DNA, 20 bp, Artificial sequence
  Synthetic oligonucleotide
catgctcacggctgtgttac

SEQ ID NO: 1302 - DNA, 20 bp, Artificial sequence
  Synthetic oligonucleotide
cccatcaaatactgagttct

SEQ ID NO: 1303 - DNA, 20 bp, Artificial sequence
  Synthetic oligonucleotide
gaaagtagtgattaatgaga

SEQ ID NO: 1304 - DNA, 20 bp, Artificial sequence
  Synthetic oligonucleotide
attaatcaacaagtggcatt

SEQ ID NO: 1305 - DNA, 20 bp, Artificial sequence
  Synthetic oligonucleotide
tttaattttagggtttagag

SEQ ID NO: 1306 - DNA, 20 bp, Artificial sequence
  Synthetic oligonucleotide
cttgctaccactagagcctt

SEQ ID NO: 1307 - DNA, 20 bp, Artificial sequence
  Synthetic oligonucleotide
accactgacttatatcattt

SEQ ID NO: 1308 - DNA, 20 bp, Artificial sequence
  Synthetic oligonucleotide
ttccccattgctaattttgt

SEQ ID NO: 1309 - DNA, 20 bp, Artificial sequence
  Synthetic oligonucleotide
tcctgaaacttagtagctgg

SEQ ID NO: 1310 - DNA, 20 bp, Artificial sequence
  Synthetic oligonucleotide
tgtcttaaaaaggaataaaa

SEQ ID NO: 1311 - DNA, 20 bp, Artificial sequence
  Synthetic oligonucleotide
cctataataaagtattgtct

SEQ ID NO: 1312 - DNA, 20 bp, Artificial sequence
  Synthetic oligonucleotide
atgtaaaatggtatagctac

SEQ ID NO: 1313 - DNA, 20 bp, Artificial sequence
  Synthetic oligonucleotide
aaccctcacacacttctgtt

SEQ ID NO: 1314 - DNA, 20 bp, Artificial sequence
  Synthetic oligonucleotide
attctgcataagcagtgttt

SEQ ID NO: 1315 - DNA, 20 bp, Artificial sequence
  Synthetic oligonucleotide
ttactaccctgaagaagaac

SEQ ID NO: 1316 - DNA, 20 bp, Artificial sequence
  Synthetic oligonucleotide
aagacctataacttactacc

SEQ ID NO: 1317 - DNA, 20 bp, Artificial sequence
  Synthetic oligonucleotide
tttcacaagatttacttggt

SEQ ID NO: 1318 - DNA, 20 bp, Artificial sequence
  Synthetic oligonucleotide
cagttgtgattgtcaaccta

SEQ ID NO: 1319 - DNA, 20 bp, Artificial sequence
  Synthetic oligonucleotide
aatcttgcctcgatgaaagt

SEQ ID NO: 1320 - DNA, 20 bp, Artificial sequence
  Synthetic oligonucleotide
tggcctaaatgtatcagtta

SEQ ID NO: 1321 - DNA, 20 bp, Artificial sequence
  Synthetic oligonucleotide
aggctttgggtaaaatcttt

SEQ ID NO: 1322 - DNA, 20 bp, Artificial sequence
  Synthetic oligonucleotide
tatgatttttaaagattaaa

SEQ ID NO: 1323 - DNA, 20 bp, Artificial sequence
  Synthetic oligonucleotide
gtacagtgaaaaagatgtgt

SEQ ID NO: 1324 - DNA, 20 bp, Artificial sequence
  Synthetic oligonucleotide
gacaggtatgaagcaaaaca

SEQ ID NO: 1325 - DNA, 20 bp, Artificial sequence
  Synthetic oligonucleotide
tgagctgagggtctttgccg

SEQ ID NO: 1326 - DNA, 20 bp, Artificial sequence
  Synthetic oligonucleotide
aggctgagttgtacacaaac

SEQ ID NO: 1327 - DNA, 20 bp, Artificial sequence
  Synthetic oligonucleotide
atgaggaggctgagttgtac

SEQ ID NO: 1328 - DNA, 20 bp, Artificial sequence
  Synthetic oligonucleotide
tcataaagtgggcccagctt

SEQ ID NO: 1329 - DNA, 20 bp, Artificial sequence
  Synthetic oligonucleotide
actcctaatccctcagtttt

SEQ ID NO: 1330 - DNA, 20 bp, Artificial sequence
  Synthetic oligonucleotide
tttacatgcaaggagctgag

SEQ ID NO: 1331 - DNA, 20 bp, Artificial sequence
  Synthetic oligonucleotide
taatgccctttctccctact

SEQ ID NO: 1332 - DNA, 20 bp, Artificial sequence
  Synthetic oligonucleotide
cctgtttagattatcccaaa

SEQ ID NO: 1333 - DNA, 20 bp, Artificial sequence
  Synthetic oligonucleotide
catgattcacagaatttctc

SEQ ID NO: 1334 - DNA, 20 bp, Artificial sequence
  Synthetic oligonucleotide
agttagaaaactcaaagtat

SEQ ID NO: 1335 - DNA, 20 bp, Artificial sequence
  Synthetic oligonucleotide
tcaaatgtacttagcataag

SEQ ID NO: 1336 - DNA, 20 bp, Artificial sequence
  Synthetic oligonucleotide
atatcaaatgtacttagcat

SEQ ID NO: 1337 - DNA, 20 bp, Artificial sequence
  Synthetic oligonucleotide
aaagttcagaagagggaatg

SEQ ID NO: 1338 - DNA, 20 bp, Artificial sequence
  Synthetic oligonucleotide
aattcccatctgagtagttt

SEQ ID NO: 1339 - DNA, 20 bp, Artificial sequence
  Synthetic oligonucleotide
gtcccctaatttcaggctaa

SEQ ID NO: 1340 - DNA, 20 bp, Artificial sequence
  Synthetic oligonucleotide
ctatgtcaaatgaaacaaaa

SEQ ID NO: 1341 - DNA, 20 bp, Artificial sequence
  Synthetic oligonucleotide
tgattatgctttgtgataaa

SEQ ID NO: 1342 - DNA, 20 bp, Artificial sequence
  Synthetic oligonucleotide
tccagctgactaggagggct

SEQ ID NO: 1343 - DNA, 20 bp, Artificial sequence
  Synthetic oligonucleotide
cataccagtctcctcgctca

SEQ ID NO: 1344 - DNA, 20 bp, Artificial sequence
  Synthetic oligonucleotide
atataacagaatccaaccat

SEQ ID NO: 1345 - DNA, 20 bp, Artificial sequence
  Synthetic oligonucleotide
tgcaaaatggccaaactaca

SEQ ID NO: 1346 - DNA, 20 bp, Artificial sequence
  Synthetic oligonucleotide
tcttcctagccacatgtgat

SEQ ID NO: 1347 - DNA, 20 bp, Artificial sequence
  Synthetic oligonucleotide
taccatgctctctaattgcc

SEQ ID NO: 1348 - DNA, 20 bp, Artificial sequence
  Synthetic oligonucleotide
agtgatctgtgccaggctgc

SEQ ID NO: 1349 - DNA, 20 bp, Artificial sequence
  Synthetic oligonucleotide
aagttacagaacagatatct

SEQ ID NO: 1350 - DNA, 20 bp, Artificial sequence
  Synthetic oligonucleotide
gtattgtgaaaatagtactg

SEQ ID NO: 1351 - DNA, 20 bp, Artificial sequence
  Synthetic oligonucleotide
aaacactatcaagctcacgg

SEQ ID NO: 1352 - DNA, 20 bp, Artificial sequence
  Synthetic oligonucleotide
ttcaagaaaagtcttcaaat

SEQ ID NO: 1353 - DNA, 20 bp, Artificial sequence
  Synthetic oligonucleotide
ggatcatttccccatgcatg

SEQ ID NO: 1354 - DNA, 20 bp, Artificial sequence
  Synthetic oligonucleotide
atattatattaagaaaaatg

SEQ ID NO: 1355 - DNA, 20 bp, Artificial sequence
  Synthetic oligonucleotide
ctcccatgttcattacttat

SEQ ID NO: 1356 - DNA, 20 bp, Artificial sequence
  Synthetic oligonucleotide
catgacattggtttgggcaa

SEQ ID NO: 1357 - DNA, 20 bp, Artificial sequence
  Synthetic oligonucleotide
aatgttgttgggaaaattgg

SEQ ID NO: 1358 - DNA, 20 bp, Artificial sequence
  Synthetic oligonucleotide
agctgcaggatacaaagtca

SEQ ID NO: 1359 - DNA, 20 bp, Artificial sequence
  Synthetic oligonucleotide
atatcctttcatgataaaaa

SEQ ID NO: 1360 - DNA, 20 bp, Artificial sequence
  Synthetic oligonucleotide
atgggctaatatctctgata

SEQ ID NO: 1361 - DNA, 20 bp, Artificial sequence
  Synthetic oligonucleotide
acattactaataattagaga

SEQ ID NO: 1362 - DNA, 20 bp, Artificial sequence
  Synthetic oligonucleotide
ataaaaacatatgaaagtat

SEQ ID NO: 1363 - DNA, 20 bp, Artificial sequence
  Synthetic oligonucleotide
ttctgaattaaatctattag

SEQ ID NO: 1364 - DNA, 20 bp, Artificial sequence
  Synthetic oligonucleotide
ttacatttttgcaaatttat

SEQ ID NO: 1365 - DNA, 20 bp, Artificial sequence
  Synthetic oligonucleotide
tgaacagttgattaacaaag

SEQ ID NO: 1366 - DNA, 20 bp, Artificial sequence
  Synthetic oligonucleotide
aagttattggtttactagat

SEQ ID NO: 1367 - DNA, 20 bp, Artificial sequence
  Synthetic oligonucleotide
ttggaaaaggtcctagaaaa

SEQ ID NO: 1368 - DNA, 20 bp, Artificial sequence
  Synthetic oligonucleotide
catgacagaaacttcttaga

SEQ ID NO: 1369 - DNA, 20 bp, Artificial sequence
  Synthetic oligonucleotide
ccatacttgctgacaaatat

SEQ ID NO: 1370 - DNA, 16 bp, Artificial sequence
  Synthetic oligonucleotide
ttggtttgtcaatcct

SEQ ID NO: 1371 - DNA, 16 bp, Artificial sequence
  Synthetic oligonucleotide
ccgagcttcgcctctg

SEQ ID NO: 1372 - DNA, 16 bp, Artificial sequence
  Synthetic oligonucleotide
cctccgagcttcgcct

SEQ ID NO: 1373 - DNA, 16 bp, Artificial sequence
  Synthetic oligonucleotide
ggacctccgagcttcg

SEQ ID NO: 1374 - DNA, 16 bp, Artificial sequence
  Synthetic oligonucleotide
cctgtaggacctccga

SEQ ID NO: 1375 - DNA, 16 bp, Artificial sequence
  Synthetic oligonucleotide
ccagtgccaaggtcaa

SEQ ID NO: 1376 - DNA, 16 bp, Artificial sequence
  Synthetic oligonucleotide
cacttgatcctgccag

SEQ ID NO: 1377 - DNA, 16 bp, Artificial sequence
  Synthetic oligonucleotide
cacttccagaaaaagc

SEQ ID NO: 1378 - DNA, 16 bp, Artificial sequence
  Synthetic oligonucleotide
gtctctcgctcaggtg

SEQ ID NO: 1379 - DNA, 16 bp, Artificial sequence
  Synthetic oligonucleotide
aaagtctctcgctcag

SEQ ID NO: 1380 - DNA, 16 bp, Artificial sequence
  Synthetic oligonucleotide
atgaaaaagtctctcg

SEQ ID NO: 1381 - DNA, 16 bp, Artificial sequence
  Synthetic oligonucleotide
tccttctggtatagaa

SEQ ID NO: 1382 - DNA, 16 bp, Artificial sequence
  Synthetic oligonucleotide
caataaggtatccaga

SEQ ID NO: 1383 - DNA, 16 bp, Artificial sequence
  Synthetic oligonucleotide
cttgatacaataaggt

SEQ ID NO: 1384 - DNA, 16 bp, Artificial sequence
  Synthetic oligonucleotide
ctagttagcttgatac

SEQ ID NO: 1385 - DNA, 16 bp, Artificial sequence
  Synthetic oligonucleotide
gatctggttgcactat

SEQ ID NO: 1386 - DNA, 16 bp, Artificial sequence
  Synthetic oligonucleotide
ggcaatgggtggatct

SEQ ID NO: 1387 - DNA, 16 bp, Artificial sequence
  Synthetic oligonucleotide
ccagttgagggcaatg

SEQ ID NO: 1388 - DNA, 16 bp, Artificial sequence
  Synthetic oligonucleotide
taaagtccagttgagg

SEQ ID NO: 1389 - DNA, 16 bp, Artificial sequence
  Synthetic oligonucleotide
tacatagagcacctca

SEQ ID NO: 1390 - DNA, 16 bp, Artificial sequence
  Synthetic oligonucleotide
tgttacatagagcacc

SEQ ID NO: 1391 - DNA, 16 bp, Artificial sequence
  Synthetic oligonucleotide
aagtgttacatagagc

SEQ ID NO: 1392 - DNA, 16 bp, Artificial sequence
  Synthetic oligonucleotide
cttcacatgtaaattg

SEQ ID NO: 1393 - DNA, 16 bp, Artificial sequence
  Synthetic oligonucleotide
gagccatggaaagtag

SEQ ID NO: 1394 - DNA, 16 bp, Artificial sequence
  Synthetic oligonucleotide
ccttccttgaggagat

SEQ ID NO: 1395 - DNA, 16 bp, Artificial sequence
  Synthetic oligonucleotide
cttcacccctaggtta

SEQ ID NO: 1396 - DNA, 16 bp, Artificial sequence
  Synthetic oligonucleotide
ccatccttcaccccta

SEQ ID NO: 1397 - DNA, 16 bp, Artificial sequence
  Synthetic oligonucleotide
gtcgccatccttcacc

SEQ ID NO: 1398 - DNA, 16 bp, Artificial sequence
  Synthetic oligonucleotide
ccagagtcgccatcct

SEQ ID NO: 1399 - DNA, 16 bp, Artificial sequence
  Synthetic oligonucleotide
gtggctgagcaacctc

SEQ ID NO: 1400 - DNA, 16 bp, Artificial sequence
  Synthetic oligonucleotide
cccttttaacctctgt

SEQ ID NO: 1401 - DNA, 16 bp, Artificial sequence
  Synthetic oligonucleotide
catcatgataaggtga

SEQ ID NO: 1402 - DNA, 16 bp, Artificial sequence
  Synthetic oligonucleotide
tggataacactgggct

SEQ ID NO: 1403 - DNA, 16 bp, Artificial sequence
  Synthetic oligonucleotide
tctgcttggataacac

SEQ ID NO: 1404 - DNA, 16 bp, Artificial sequence
  Synthetic oligonucleotide
gaatatgggcagcttg

SEQ ID NO: 1405 - DNA, 16 bp, Artificial sequence
  Synthetic oligonucleotide
agctgaatatgggcag

SEQ ID NO: 1406 - DNA, 16 bp, Artificial sequence
  Synthetic oligonucleotide
ttgcttagctgaatat

SEQ ID NO: 1407 - DNA, 16 bp, Artificial sequence
  Synthetic oligonucleotide
tggattgcttagctga

SEQ ID NO: 1408 - DNA, 16 bp, Artificial sequence
  Synthetic oligonucleotide
acttggattgcttagc

SEQ ID NO: 1409 - DNA, 16 bp, Artificial sequence
  Synthetic oligonucleotide
agtgaacttggattgc

SEQ ID NO: 1410 - DNA, 16 bp, Artificial sequence
  Synthetic oligonucleotide
ggcataaaagtcgatg

SEQ ID NO: 1411 - DNA, 16 bp, Artificial sequence
  Synthetic oligonucleotide
ctgggcataaaagtcg

SEQ ID NO: 1412 - DNA, 16 bp, Artificial sequence
  Synthetic oligonucleotide
ggaaaggaccacacta

SEQ ID NO: 1413 - DNA, 16 bp, Artificial sequence
  Synthetic oligonucleotide
gagtgagaccatttcc

SEQ ID NO: 1414 - DNA, 16 bp, Artificial sequence
  Synthetic oligonucleotide
gatgtgaggagccaca

SEQ ID NO: 1415 - DNA, 16 bp, Artificial sequence
  Synthetic oligonucleotide
cttgatgtgaggagcc

SEQ ID NO: 1416 - DNA, 16 bp, Artificial sequence
  Synthetic oligonucleotide
tcaaccttgatgtgag

SEQ ID NO: 1417 - DNA, 16 bp, Artificial sequence
  Synthetic oligonucleotide
tgattcaaccttgatg

SEQ ID NO: 1418 - DNA, 16 bp, Artificial sequence
  Synthetic oligonucleotide
gtgtgattcaaccttg

SEQ ID NO: 1419 - DNA, 16 bp, Artificial sequence
  Synthetic oligonucleotide
tatgtgtgattcaacc

SEQ ID NO: 1420 - DNA, 16 bp, Artificial sequence
  Synthetic oligonucleotide
ggcatctcagaacctg

SEQ ID NO: 1421 - DNA, 16 bp, Artificial sequence
  Synthetic oligonucleotide
ggtatagtctgggaca

SEQ ID NO: 1422 - DNA, 16 bp, Artificial sequence
  Synthetic oligonucleotide
tggaggtatagtctgg

SEQ ID NO: 1423 - DNA, 16 bp, Artificial sequence
  Synthetic oligonucleotide
gaatggaggtatagtc

SEQ ID NO: 1424 - DNA, 16 bp, Artificial sequence
  Synthetic oligonucleotide
tatgaatggaggtata

SEQ ID NO: 1425 - DNA, 16 bp, Artificial sequence
  Synthetic oligonucleotide
ctatatgaatggaggt

SEQ ID NO: 1426 - DNA, 16 bp, Artificial sequence
  Synthetic oligonucleotide
gtactatatgaatgga

SEQ ID NO: 1427 - DNA, 16 bp, Artificial sequence
  Synthetic oligonucleotide
gggactgtactatatg

SEQ ID NO: 1428 - DNA, 16 bp, Artificial sequence
  Synthetic oligonucleotide
ttacattgcacaatag

SEQ ID NO: 1429 - DNA, 16 bp, Artificial sequence
  Synthetic oligonucleotide
tagccatgcttgaagt

SEQ ID NO: 1430 - DNA, 16 bp, Artificial sequence
  Synthetic oligonucleotide
tgtgtagtgtaatata

SEQ ID NO: 1431 - DNA, 16 bp, Artificial sequence
  Synthetic oligonucleotide
acagtgtgtagtgtaa

SEQ ID NO: 1432 - DNA, 16 bp, Artificial sequence
  Synthetic oligonucleotide
gcagtacacagtgtgt

SEQ ID NO: 1433 - DNA, 16 bp, Artificial sequence
  Synthetic oligonucleotide
actgcagtacacagtg

SEQ ID NO: 1434 - DNA, 16 bp, Artificial sequence
  Synthetic oligonucleotide
ttagactgtagttgct

SEQ ID NO: 1435 - DNA, 16 bp, Artificial sequence
  Synthetic oligonucleotide
ccagctttagactgta

SEQ ID NO: 1436 - DNA, 16 bp, Artificial sequence
  Synthetic oligonucleotide
taaaccagctttagac

SEQ ID NO: 1437 - DNA, 16 bp, Artificial sequence
  Synthetic oligonucleotide
aacattaaaccagctt

SEQ ID NO: 1438 - DNA, 16 bp, Artificial sequence
  Synthetic oligonucleotide
actacaatcattttag

SEQ ID NO: 1439 - DNA, 16 bp, Artificial sequence
  Synthetic oligonucleotide
gattactacaatcatt

SEQ ID NO: 1440 - DNA, 16 bp, Artificial sequence
  Synthetic oligonucleotide
aatgcagattactaca

SEQ ID NO: 1441 - DNA, 16 bp, Artificial sequence
  Synthetic oligonucleotide
tccaataatgcagatt

SEQ ID NO: 1442 - DNA, 16 bp, Artificial sequence
  Synthetic oligonucleotide
gttgatctgtgcaaac

SEQ ID NO: 1443 - DNA, 16 bp, Artificial sequence
  Synthetic oligonucleotide
tctacttctcttagca

SEQ ID NO: 1444 - DNA, 16 bp, Artificial sequence
  Synthetic oligonucleotide
gcttcttgtaccttat

SEQ ID NO: 1445 - DNA, 16 bp, Artificial sequence
  Synthetic oligonucleotide
gatttgcttcaactta

SEQ ID NO: 1446 - DNA, 16 bp, Artificial sequence
  Synthetic oligonucleotide
ggttataggctgtgaa

SEQ ID NO: 1447 - DNA, 16 bp, Artificial sequence
  Synthetic oligonucleotide
tctggttataggctgt

SEQ ID NO: 1448 - DNA, 16 bp, Artificial sequence
  Synthetic oligonucleotide
gtgtctggttataggc

SEQ ID NO: 1449 - DNA, 16 bp, Artificial sequence
  Synthetic oligonucleotide
agtatgtgtctggtta

SEQ ID NO: 1450 - DNA, 16 bp, Artificial sequence
  Synthetic oligonucleotide
gggactgaaaaccttg

SEQ ID NO: 1451 - DNA, 16 bp, Artificial sequence
  Synthetic oligonucleotide
agtattcttcactgag

SEQ ID NO: 1452 - DNA, 16 bp, Artificial sequence
  Synthetic oligonucleotide
gcgataaatgggaaat

SEQ ID NO: 1453 - DNA, 16 bp, Artificial sequence
  Synthetic oligonucleotide
gtctgcgataaatggg

SEQ ID NO: 1454 - DNA, 16 bp, Artificial sequence
  Synthetic oligonucleotide
cctaaaaaaggtctgc

SEQ ID NO: 1455 - DNA, 16 bp, Artificial sequence
  Synthetic oligonucleotide
cattaagcttgcttcc

SEQ ID NO: 1456 - DNA, 16 bp, Artificial sequence
  Synthetic oligonucleotide
cacaactagtcatact

SEQ ID NO: 1457 - DNA, 16 bp, Artificial sequence
  Synthetic oligonucleotide
aactgccagacacaac

SEQ ID NO: 1458 - DNA, 16 bp, Artificial sequence
  Synthetic oligonucleotide
ataaactgccagacac

SEQ ID NO: 1459 - DNA, 16 bp, Artificial sequence
  Synthetic oligonucleotide
tatcaggaatccaaga

SEQ ID NO: 1460 - DNA, 16 bp, Artificial sequence
  Synthetic oligonucleotide
ttgataacagaagcac

SEQ ID NO: 1461 - DNA, 16 bp, Artificial sequence
  Synthetic oligonucleotide
ttggtgtttgataaca

SEQ ID NO: 1462 - DNA, 16 bp, Artificial sequence
  Synthetic oligonucleotide
atgttggtgtttgata

SEQ ID NO: 1463 - DNA, 16 bp, Artificial sequence
  Synthetic oligonucleotide
ccgccactgtagcagc

SEQ ID NO: 1464 - DNA, 16 bp, Artificial sequence
  Synthetic oligonucleotide
cgccaccgccactgta

SEQ ID NO: 1465 - DNA, 16 bp, Artificial sequence
  Synthetic oligonucleotide
gccgcccgggctcagc

SEQ ID NO: 1466 - DNA, 16 bp, Artificial sequence
  Synthetic oligonucleotide
cgccgccgcccgggct

SEQ ID NO: 1467 - DNA, 16 bp, Artificial sequence
  Synthetic oligonucleotide
gagagcgcgggttcgc

SEQ ID NO: 1468 - DNA, 16 bp, Artificial sequence
  Synthetic oligonucleotide
ctactgaccccagttc

SEQ ID NO: 1469 - DNA, 16 bp, Artificial sequence
  Synthetic oligonucleotide
tcactctactgacccc

SEQ ID NO: 1470 - DNA, 16 bp, Artificial sequence
  Synthetic oligonucleotide
tcatgcggactggtgg

SEQ ID NO: 1471 - DNA, 16 bp, Artificial sequence
  Synthetic oligonucleotide
atgtgagcatggaccc

SEQ ID NO: 1472 - DNA, 16 bp, Artificial sequence
  Synthetic oligonucleotide
tcttgatatgtgagca

SEQ ID NO: 1473 - DNA, 16 bp, Artificial sequence
  Synthetic oligonucleotide
ttcaagttggtgagct

SEQ ID NO: 1474 - DNA, 16 bp, Artificial sequence
  Synthetic oligonucleotide
tgcttccttcaagttg

SEQ ID NO: 1475 - DNA, 16 bp, Artificial sequence
  Synthetic oligonucleotide
tgtaatttcattcatg

SEQ ID NO: 1476 - DNA, 16 bp, Artificial sequence
  Synthetic oligonucleotide
ccttttgccaagagca

SEQ ID NO: 1477 - DNA, 16 bp, Artificial sequence
  Synthetic oligonucleotide
gatccttttgccaaga

SEQ ID NO: 1478 - DNA, 16 bp, Artificial sequence
  Synthetic oligonucleotide
gctagtaatgttacat

SEQ ID NO: 1479 - DNA, 16 bp, Artificial sequence
  Synthetic oligonucleotide
gcaacttgctagtaat

SEQ ID NO: 1480 - DNA, 16 bp, Artificial sequence
  Synthetic oligonucleotide
tgtgcaacttgctagt

SEQ ID NO: 1481 - DNA, 16 bp, Artificial sequence
  Synthetic oligonucleotide
ggatttcagtttgaat

SEQ ID NO: 1482 - DNA, 16 bp, Artificial sequence
  Synthetic oligonucleotide
ctcagagccttggtag

SEQ ID NO: 1483 - DNA, 16 bp, Artificial sequence
  Synthetic oligonucleotide
caaacgcgcaaaagac

SEQ ID NO: 1484 - DNA, 16 bp, Artificial sequence
  Synthetic oligonucleotide
gcccgcacaaacgcgc

SEQ ID NO: 1485 - DNA, 16 bp, Artificial sequence
  Synthetic oligonucleotide
ggttaaagaagttgct

SEQ ID NO: 1486 - DNA, 16 bp, Artificial sequence
  Synthetic oligonucleotide
cccagtgaattcagca

SEQ ID NO: 1487 - DNA, 16 bp, Artificial sequence
  Synthetic oligonucleotide
gcgcccagtgaattca

SEQ ID NO: 1488 - DNA, 16 bp, Artificial sequence
  Synthetic oligonucleotide
aagatgcgcccagtga

SEQ ID NO: 1489 - DNA, 16 bp, Artificial sequence
  Synthetic oligonucleotide
tgtaagatgcgcccag

SEQ ID NO: 1490 - DNA, 16 bp, Artificial sequence
  Synthetic oligonucleotide
aattacttgtaagatg

SEQ ID NO: 1491 - DNA, 16 bp, Artificial sequence
  Synthetic oligonucleotide
cccagaaggcacttgt

SEQ ID NO: 1492 - DNA, 16 bp, Artificial sequence
  Synthetic oligonucleotide
ttgcagaacaaatctt

SEQ ID NO: 1493 - DNA, 16 bp, Artificial sequence
  Synthetic oligonucleotide
catggaagatttgcag

SEQ ID NO: 1494 - DNA, 16 bp, Artificial sequence
  Synthetic oligonucleotide
ggtcatggaagatttg

SEQ ID NO: 1495 - DNA, 16 bp, Artificial sequence
  Synthetic oligonucleotide
gaccttggtcatggaa

SEQ ID NO: 1496 - DNA, 16 bp, Artificial sequence
  Synthetic oligonucleotide
tgccaatccaaagagg

SEQ ID NO: 1497 - DNA, 16 bp, Artificial sequence
  Synthetic oligonucleotide
gggtctgccaatccaa

SEQ ID NO: 1498 - DNA, 16 bp, Artificial sequence
  Synthetic oligonucleotide
tccctgggtctgccaa

SEQ ID NO: 1499 - DNA, 16 bp, Artificial sequence
  Synthetic oligonucleotide
aagtgtgaatttatct

SEQ ID NO: 1500 - DNA, 16 bp, Artificial sequence
  Synthetic oligonucleotide
ggagatctcaacaagg

SEQ ID NO: 1501 - DNA, 16 bp, Artificial sequence
  Synthetic oligonucleotide
tcgcccatcactcttc

SEQ ID NO: 1502 - DNA, 16 bp, Artificial sequence
  Synthetic oligonucleotide
cctgtcgcccatcact

SEQ ID NO: 1503 - DNA, 16 bp, Artificial sequence
  Synthetic oligonucleotide
tcacctgtcgcccatc

SEQ ID NO: 1504 - DNA, 16 bp, Artificial sequence
  Synthetic oligonucleotide
ccatcacctgtcgccc

SEQ ID NO: 1505 - DNA, 16 bp, Artificial sequence
  Synthetic oligonucleotide
tcaccatcacctgtcg

SEQ ID NO: 1506 - DNA, 16 bp, Artificial sequence
  Synthetic oligonucleotide
taatagttgtcaccat

SEQ ID NO: 1507 - DNA, 16 bp, Artificial sequence
  Synthetic oligonucleotide
ttcagatcttattaat

SEQ ID NO: 1508 - DNA, 16 bp, Artificial sequence
  Synthetic oligonucleotide
ttgcaaattcagtctg

SEQ ID NO: 1509 - DNA, 16 bp, Artificial sequence
  Synthetic oligonucleotide
cgttctcttggaagta

SEQ ID NO: 1510 - DNA, 16 bp, Artificial sequence
  Synthetic oligonucleotide
tcttgaataaatttcg

SEQ ID NO: 1511 - DNA, 16 bp, Artificial sequence
  Synthetic oligonucleotide
aagctcactcttcaat

SEQ ID NO: 1512 - DNA, 16 bp, Artificial sequence
  Synthetic oligonucleotide
tccaagctcactcttc

SEQ ID NO: 1513 - DNA, 16 bp, Artificial sequence
  Synthetic oligonucleotide
gctcctgccactctgt

SEQ ID NO: 1514 - DNA, 16 bp, Artificial sequence
  Synthetic oligonucleotide
atgggcaaaggcatct

SEQ ID NO: 1515 - DNA, 16 bp, Artificial sequence
  Synthetic oligonucleotide
agtcttcccggcgagg

SEQ ID NO: 1516 - DNA, 16 bp, Artificial sequence
  Synthetic oligonucleotide
ccgccgctccctagcc

SEQ ID NO: 1517 - DNA, 16 bp, Artificial sequence
  Synthetic oligonucleotide
gcccgcaactccctgc

SEQ ID NO: 1518 - DNA, 16 bp, Artificial sequence
  Synthetic oligonucleotide
cgcctccccaggcgca

SEQ ID NO: 1519 - DNA, 16 bp, Artificial sequence
  Synthetic oligonucleotide
gagtgtcttcccaggc

SEQ ID NO: 1520 - DNA, 16 bp, Artificial sequence
  Synthetic oligonucleotide
ctgaagactccttgaa

SEQ ID NO: 1521 - DNA, 16 bp, Artificial sequence
  Synthetic oligonucleotide
ggctagccaagttgga

SEQ ID NO: 1522 - DNA, 16 bp, Artificial sequence
  Synthetic oligonucleotide
tgactccagtcttacc

SEQ ID NO: 1523 - DNA, 16 bp, Artificial sequence
  Synthetic oligonucleotide
attcattgtggtcagc

SEQ ID NO: 1524 - DNA, 16 bp, Artificial sequence
  Synthetic oligonucleotide
gaagtgggtttttccc

SEQ ID NO: 1525 - DNA, 16 bp, Artificial sequence
  Synthetic oligonucleotide
gccttggttcaggtga

SEQ ID NO: 1526 - DNA, 16 bp, Artificial sequence
  Synthetic oligonucleotide
ccactgtagcagccgc

SEQ ID NO: 1527 - DNA, 16 bp, Artificial sequence
  Synthetic oligonucleotide
taggtatttcagagcc

SEQ ID NO: 1528 - DNA, 16 bp, Artificial sequence
  Synthetic oligonucleotide
gtccaggcagagttgt

SEQ ID NO: 1529 - DNA, 16 bp, Artificial sequence
  Synthetic oligonucleotide
agccaaatgttggtca

SEQ ID NO: 1530 - DNA, 16 bp, Artificial sequence
  Synthetic oligonucleotide
gagggcgagtttttcc

SEQ ID NO: 1531 - DNA, 16 bp, Artificial sequence
  Synthetic oligonucleotide
gtggcattggcaagcc

SEQ ID NO: 1532 - DNA, 16 bp, Artificial sequence
  Synthetic oligonucleotide
accccactgcaccaag

SEQ ID NO: 1533 - DNA, 16 bp, Artificial sequence
  Synthetic oligonucleotide
tccaagtacttgccaa

SEQ ID NO: 1534 - DNA, 16 bp, Artificial sequence
  Synthetic oligonucleotide
agtgcctggcctaagg

SEQ ID NO: 1535 - DNA, 16 bp, Artificial sequence
  Synthetic oligonucleotide
gcgcttcttccctagg

SEQ ID NO: 1536 - DNA, 16 bp, Artificial sequence
  Synthetic oligonucleotide
catcttgcccagggat

SEQ ID NO: 1537 - DNA, 16 bp, Artificial sequence
  Synthetic oligonucleotide
ccatcttgctccaagt

SEQ ID NO: 1538 - DNA, 16 bp, Artificial sequence
  Synthetic oligonucleotide
cttacatcctgtaggc

SEQ ID NO: 1539 - DNA, 16 bp, Artificial sequence
  Synthetic oligonucleotide
cgcctcctggtcctca

SEQ ID NO: 1540 - DNA, 16 bp, Artificial sequence
  Synthetic oligonucleotide
ccctatgcactaccta

SEQ ID NO: 1541 - DNA, 16 bp, Artificial sequence
  Synthetic oligonucleotide
gagggactgtggtgct

SEQ ID NO: 1542 - DNA, 16 bp, Artificial sequence
  Synthetic oligonucleotide
gcccaatatgtgccag

SEQ ID NO: 1543 - DNA, 16 bp, Artificial sequence
  Synthetic oligonucleotide
gctctctcatcgctgg

SEQ ID NO: 1544 - DNA, 16 bp, Artificial sequence
  Synthetic oligonucleotide
ctcaaggctatgtgcc

SEQ ID NO: 1545 - DNA, 16 bp, Artificial sequence
  Synthetic oligonucleotide
tccacatccctcatgt

SEQ ID NO: 1546 - DNA, 16 bp, Artificial sequence
  Synthetic oligonucleotide
aggactgaaggcccat

SEQ ID NO: 1547 - DNA, 16 bp, Artificial sequence
  Synthetic oligonucleotide
gtgcgacttaccagct

SEQ ID NO: 1548 - DNA, 16 bp, Artificial sequence
  Synthetic oligonucleotide
tcgctaaagccacaca

SEQ ID NO: 1549 - DNA, 16 bp, Artificial sequence
  Synthetic oligonucleotide
gctctggctgatggtc

SEQ ID NO: 1550 - DNA, 16 bp, Artificial sequence
  Synthetic oligonucleotide
ttcccatgaggatttc

SEQ ID NO: 1551 - DNA, 16 bp, Artificial sequence
  Synthetic oligonucleotide
ttgggcttaagcacta

SEQ ID NO: 1552 - DNA, 16 bp, Artificial sequence
  Synthetic oligonucleotide
gctagcacctagtcca

SEQ ID NO: 1553 - DNA, 16 bp, Artificial sequence
  Synthetic oligonucleotide
cctctggcctacaaca

SEQ ID NO: 1554 - DNA, 16 bp, Artificial sequence
  Synthetic oligonucleotide
acccctcatcagcacc

SEQ ID NO: 1555 - DNA, 16 bp, Artificial sequence
  Synthetic oligonucleotide
ggccacccctgatcct

SEQ ID NO: 1556 - DNA, 16 bp, Artificial sequence
  Synthetic oligonucleotide
gaagctcccttgccca

SEQ ID NO: 1557 - DNA, 16 bp, Artificial sequence
  Synthetic oligonucleotide
agtgttgcccctccaa

SEQ ID NO: 1558 - DNA, 16 bp, Artificial sequence
  Synthetic oligonucleotide
gggtctccaacctact

SEQ ID NO: 1559 - DNA, 16 bp, Artificial sequence
  Synthetic oligonucleotide
gggatgtaggtttacc

SEQ ID NO: 1560 - DNA, 16 bp, Artificial sequence
  Synthetic oligonucleotide
gcaaccgatatcacag

SEQ ID NO: 1561 - DNA, 16 bp, Artificial sequence
  Synthetic oligonucleotide
tgccctggaacaaatt

SEQ ID NO: 1562 - DNA, 16 bp, Artificial sequence
  Synthetic oligonucleotide
agtctaggagtagcta

SEQ ID NO: 1563 - DNA, 16 bp, Artificial sequence
  Synthetic oligonucleotide
gctgttgtcaagagac

SEQ ID NO: 1564 - DNA, 16 bp, Artificial sequence
  Synthetic oligonucleotide
cacctagacactcagt

SEQ ID NO: 1565 - DNA, 16 bp, Artificial sequence
  Synthetic oligonucleotide
gtcaagggatccctgc

SEQ ID NO: 1566 - DNA, 16 bp, Artificial sequence
  Synthetic oligonucleotide
tccccctggcactcca

SEQ ID NO: 1567 - DNA, 16 bp, Artificial sequence
  Synthetic oligonucleotide
gcctggtaactccatt

SEQ ID NO: 1568 - DNA, 16 bp, Artificial sequence
  Synthetic oligonucleotide
gggctcaccaactgtg

SEQ ID NO: 1569 - DNA, 16 bp, Artificial sequence
  Synthetic oligonucleotide
ccacaggatcatatca

SEQ ID NO: 1570 - DNA, 16 bp, Artificial sequence
  Synthetic oligonucleotide
ctccagcagaagtgtc

SEQ ID NO: 1571 - DNA, 16 bp, Artificial sequence
  Synthetic oligonucleotide
agcccaactgttgcct

SEQ ID NO: 1572 - DNA, 16 bp, Artificial sequence
  Synthetic oligonucleotide
tgccaggcagttgcca

SEQ ID NO: 1573 - DNA, 16 bp, Artificial sequence
  Synthetic oligonucleotide
gccagtaagcaccttg

SEQ ID NO: 1574 - DNA, 16 bp, Artificial sequence
  Synthetic oligonucleotide
ctagcttcccagcccc

SEQ ID NO: 1575 - DNA, 16 bp, Artificial sequence
  Synthetic oligonucleotide
tcaagcccagctagca

SEQ ID NO: 1576 - DNA, 16 bp, Artificial sequence
  Synthetic oligonucleotide
cctcacaggccctaat

SEQ ID NO: 1577 - DNA, 16 bp, Artificial sequence
  Synthetic oligonucleotide
acctgcttacatggta

SEQ ID NO: 1578 - DNA, 16 bp, Artificial sequence
  Synthetic oligonucleotide
cctttgctaggaccca

SEQ ID NO: 1579 - DNA, 16 bp, Artificial sequence
  Synthetic oligonucleotide
gggactgccaccaagg

SEQ ID NO: 1580 - DNA, 16 bp, Artificial sequence
  Synthetic oligonucleotide
gctagatgttcaggcc

SEQ ID NO: 1581 - DNA, 16 bp, Artificial sequence
  Synthetic oligonucleotide
cctatggccatgctga

SEQ ID NO: 1582 - DNA, 16 bp, Artificial sequence
  Synthetic oligonucleotide
gtatgctagttcccat

SEQ ID NO: 1583 - DNA, 16 bp, Artificial sequence
  Synthetic oligonucleotide
ccctcataatcttggg

SEQ ID NO: 1584 - DNA, 16 bp, Artificial sequence
  Synthetic oligonucleotide
gtccaaccactaccac

SEQ ID NO: 1585 - DNA, 16 bp, Artificial sequence
  Synthetic oligonucleotide
acttgcagatagctga

SEQ ID NO: 1586 - DNA, 16 bp, Artificial sequence
  Synthetic oligonucleotide
gcatgaccccactgcc

SEQ ID NO: 1587 - DNA, 16 bp, Artificial sequence
  Synthetic oligonucleotide
gagggtcacattccct

SEQ ID NO: 1588 - DNA, 16 bp, Artificial sequence
  Synthetic oligonucleotide
tctcttactggtgggt

SEQ ID NO: 1589 - DNA, 16 bp, Artificial sequence
  Synthetic oligonucleotide
gcccccttcctggata

SEQ ID NO: 1590 - DNA, 16 bp, Artificial sequence
  Synthetic oligonucleotide
cctcatgcgacaccac

SEQ ID NO: 1591 - DNA, 16 bp, Artificial sequence
  Synthetic oligonucleotide
agccctctgcctgtaa

SEQ ID NO: 1592 - DNA, 16 bp, Artificial sequence
  Synthetic oligonucleotide
ctcccagctataggcg

SEQ ID NO: 1593 - DNA, 16 bp, Artificial sequence
  Synthetic oligonucleotide
gctagctgcgcaagga

SEQ ID NO: 1594 - DNA, 16 bp, Artificial sequence
  Synthetic oligonucleotide
gcgcagcccgctgcaa

SEQ ID NO: 1595 - DNA, 16 bp, Artificial sequence
  Synthetic oligonucleotide
tgcatgatccacccca

SEQ ID NO: 1596 - DNA, 16 bp, Artificial sequence
  Synthetic oligonucleotide
gcttagtgctggccca

SEQ ID NO: 1597 - DNA, 16 bp, Artificial sequence
  Synthetic oligonucleotide
ccttccagtcctcata

SEQ ID NO: 1598 - DNA, 16 bp, Artificial sequence
  Synthetic oligonucleotide
atagtgtcaaggccca

SEQ ID NO: 1599 - DNA, 16 bp, Artificial sequence
  Synthetic oligonucleotide
aggccttagtcaccca

SEQ ID NO: 1600 - DNA, 16 bp, Artificial sequence
  Synthetic oligonucleotide
taaccaacctaaggga

SEQ ID NO: 1601 - DNA, 16 bp, Artificial sequence
  Synthetic oligonucleotide
attctggtgatgccct

SEQ ID NO: 1602 - DNA, 16 bp, Artificial sequence
  Synthetic oligonucleotide
gtgttcactgccatga

SEQ ID NO: 1603 - DNA, 16 bp, Artificial sequence
  Synthetic oligonucleotide
ggtagagcacactgcc

SEQ ID NO: 1604 - DNA, 16 bp, Artificial sequence
  Synthetic oligonucleotide
ccactttaatgccacc

SEQ ID NO: 1605 - DNA, 16 bp, Artificial sequence
  Synthetic oligonucleotide
gtcaaatgctgttggg

SEQ ID NO: 1606 - DNA, 16 bp, Artificial sequence
  Synthetic oligonucleotide
catcccctatcagggt

SEQ ID NO: 1607 - DNA, 16 bp, Artificial sequence
  Synthetic oligonucleotide
ctcgaatcccttgagc

SEQ ID NO: 1608 - DNA, 16 bp, Artificial sequence
  Synthetic oligonucleotide
gattccctcccctaac

SEQ ID NO: 1609 - DNA, 16 bp, Artificial sequence
  Synthetic oligonucleotide
atccatccatgtgctg

SEQ ID NO: 1610 - DNA, 16 bp, Artificial sequence
  Synthetic oligonucleotide
gagcatgcctcagtgg

SEQ ID NO: 1611 - DNA, 16 bp, Artificial sequence
  Synthetic oligonucleotide
cagaaggactgcctct

SEQ ID NO: 1612 - DNA, 16 bp, Artificial sequence
  Synthetic oligonucleotide
acaatgctcaacagcc

SEQ ID NO: 1613 - DNA, 16 bp, Artificial sequence
  Synthetic oligonucleotide
gttggatctggcatgc

SEQ ID NO: 1614 - DNA, 16 bp, Artificial sequence
  Synthetic oligonucleotide
cggctgagagcaaggg

SEQ ID NO: 1615 - DNA, 16 bp, Artificial sequence
  Synthetic oligonucleotide
gagagggttcagcctg

SEQ ID NO: 1616 - DNA, 16 bp, Artificial sequence
  Synthetic oligonucleotide
acttagttcctagcca

SEQ ID NO: 1617 - DNA, 16 bp, Artificial sequence
  Synthetic oligonucleotide
gtgaaccagatgtgct

SEQ ID NO: 1618 - DNA, 16 bp, Artificial sequence
  Synthetic oligonucleotide
ggagtgacagctaagt

SEQ ID NO: 1619 - DNA, 16 bp, Artificial sequence
  Synthetic oligonucleotide
aagtgttcagagccac

SEQ ID NO: 1620 - DNA, 16 bp, Artificial sequence
  Synthetic oligonucleotide
aaccctgccaaggtac

SEQ ID NO: 1621 - DNA, 16 bp, Artificial sequence
  Synthetic oligonucleotide
gatggtgagcactacc

SEQ ID NO: 1622 - DNA, 16 bp, Artificial sequence
  Synthetic oligonucleotide
ggcaggataggacaga

SEQ ID NO: 1623 - DNA, 16 bp, Artificial sequence
  Synthetic oligonucleotide
gcaaagtgatgagcct

SEQ ID NO: 1624 - DNA, 16 bp, Artificial sequence
  Synthetic oligonucleotide
ctatccacaccattcc

SEQ ID NO: 1625 - DNA, 16 bp, Artificial sequence
  Synthetic oligonucleotide
ggatcatgggccccta

SEQ ID NO: 1626 - DNA, 16 bp, Artificial sequence
  Synthetic oligonucleotide
gtgaatttgctgggcc

SEQ ID NO: 1627 - DNA, 16 bp, Artificial sequence
  Synthetic oligonucleotide
gtgatgggcccaaggc

SEQ ID NO: 1628 - DNA, 16 bp, Artificial sequence
  Synthetic oligonucleotide
tcctcagtcggcttgc

SEQ ID NO: 1629 - DNA, 16 bp, Artificial sequence
  Synthetic oligonucleotide
cagccttttgccagat

SEQ ID NO: 1630 - DNA, 16 bp, Artificial sequence
  Synthetic oligonucleotide
cctccctaggattacc

SEQ ID NO: 1631 - DNA, 16 bp, Artificial sequence
  Synthetic oligonucleotide
acgccccaatcactca

SEQ ID NO: 1632 - DNA, 16 bp, Artificial sequence
  Synthetic oligonucleotide
gcatgacccattatgt

SEQ ID NO: 1633 - DNA, 16 bp, Artificial sequence
  Synthetic oligonucleotide
tccctccaagagctca

SEQ ID NO: 1634 - DNA, 16 bp, Artificial sequence
  Synthetic oligonucleotide
gatgcctgtggctgac

SEQ ID NO: 1635 - DNA, 16 bp, Artificial sequence
  Synthetic oligonucleotide
ggctagcatgttgcct

SEQ ID NO: 1636 - DNA, 16 bp, Artificial sequence
  Synthetic oligonucleotide
taacccactaggctgg

SEQ ID NO: 1637 - DNA, 16 bp, Artificial sequence
  Synthetic oligonucleotide
tggcccaaaactaatc

SEQ ID NO: 1638 - DNA, 16 bp, Artificial sequence
  Synthetic oligonucleotide
ggagcagtctggcacc

SEQ ID NO: 1639 - DNA, 16 bp, Artificial sequence
  Synthetic oligonucleotide
tattctgtgggacaag

SEQ ID NO: 1640 - DNA, 16 bp, Artificial sequence
  Synthetic oligonucleotide
gtgtctagttccagcc

SEQ ID NO: 1641 - DNA, 16 bp, Artificial sequence
  Synthetic oligonucleotide
tactatcatgtagcgc

SEQ ID NO: 1642 - DNA, 16 bp, Artificial sequence
  Synthetic oligonucleotide
tgcccttgtagtgaga

SEQ ID NO: 1643 - DNA, 16 bp, Artificial sequence
  Synthetic oligonucleotide
tccccaacctacaagc

SEQ ID NO: 1644 - DNA, 16 bp, Artificial sequence
  Synthetic oligonucleotide
gctctaggcatatgaa

SEQ ID NO: 1645 - DNA, 16 bp, Artificial sequence
  Synthetic oligonucleotide
tacctcccttgtaggg

SEQ ID NO: 1646 - DNA, 16 bp, Artificial sequence
  Synthetic oligonucleotide
ggttcccttgcagaga

SEQ ID NO: 1647 - DNA, 16 bp, Artificial sequence
  Synthetic oligonucleotide
gtgccctcttcatgcc

SEQ ID NO: 1648 - DNA, 16 bp, Artificial sequence
  Synthetic oligonucleotide
cctgtgtgcaactggc

SEQ ID NO: 1649 - DNA, 16 bp, Artificial sequence
  Synthetic oligonucleotide
ctgagtcatttgcctg

SEQ ID NO: 1650 - DNA, 16 bp, Artificial sequence
  Synthetic oligonucleotide
ggccttagtaggccag

SEQ ID NO: 1651 - DNA, 16 bp, Artificial sequence
  Synthetic oligonucleotide
gtccttgcagtcaacc

SEQ ID NO: 1652 - DNA, 16 bp, Artificial sequence
  Synthetic oligonucleotide
gctgggccaagtccat

SEQ ID NO: 1653 - DNA, 16 bp, Artificial sequence
  Synthetic oligonucleotide
tagggcactttttgcc

SEQ ID NO: 1654 - DNA, 16 bp, Artificial sequence
  Synthetic oligonucleotide
gctgaggtccctctct

SEQ ID NO: 1655 - DNA, 16 bp, Artificial sequence
  Synthetic oligonucleotide
ctttggtcccattgcc

SEQ ID NO: 1656 - DNA, 16 bp, Artificial sequence
  Synthetic oligonucleotide
ggaacatgccaagggc

SEQ ID NO: 1657 - DNA, 16 bp, Artificial sequence
  Synthetic oligonucleotide
aggtggtctcccttca

SEQ ID NO: 1658 - DNA, 16 bp, Artificial sequence
  Synthetic oligonucleotide
tcccaaagctcccctc

SEQ ID NO: 1659 - DNA, 16 bp, Artificial sequence
  Synthetic oligonucleotide
cctggcctagcaagct

SEQ ID NO: 1660 - DNA, 16 bp, Artificial sequence
  Synthetic oligonucleotide
tcttagccctgggcta

SEQ ID NO: 1661 - DNA, 16 bp, Artificial sequence
  Synthetic oligonucleotide
gacttggactgggctc

SEQ ID NO: 1662 - DNA, 16 bp, Artificial sequence
  Synthetic oligonucleotide
ggcctaggatctagga

SEQ ID NO: 1663 - DNA, 16 bp, Artificial sequence
  Synthetic oligonucleotide
gtcaggctagagggac

SEQ ID NO: 1664 - DNA, 16 bp, Artificial sequence
  Synthetic oligonucleotide
ggaagttctcccagcc

SEQ ID NO: 1665 - DNA, 16 bp, Artificial sequence
  Synthetic oligonucleotide
cctgactgatgtacac

SEQ ID NO: 1666 - DNA, 16 bp, Artificial sequence
  Synthetic oligonucleotide
ctctggcctagcctat

SEQ ID NO: 1667 - DNA, 16 bp, Artificial sequence
  Synthetic oligonucleotide
ggctgctgtcagatgc

SEQ ID NO: 1668 - DNA, 16 bp, Artificial sequence
  Synthetic oligonucleotide
tctcaggtgtaggcag

SEQ ID NO: 1669 - DNA, 16 bp, Artificial sequence
  Synthetic oligonucleotide
ggtcactgagactggg

SEQ ID NO: 1670 - DNA, 16 bp, Artificial sequence
  Synthetic oligonucleotide
acccactagcagctag

SEQ ID NO: 1671 - DNA, 16 bp, Artificial sequence
  Synthetic oligonucleotide
cggatgaggcagttag

SEQ ID NO: 1672 - DNA, 16 bp, Artificial sequence
  Synthetic oligonucleotide
tggtaggccctctggc

SEQ ID NO: 1673 - DNA, 16 bp, Artificial sequence
  Synthetic oligonucleotide
gtcacaaggtgggtgc

SEQ ID NO: 1674 - DNA, 16 bp, Artificial sequence
  Synthetic oligonucleotide
gtcttgccctcacgga

SEQ ID NO: 1675 - DNA, 16 bp, Artificial sequence
  Synthetic oligonucleotide
gcagtctgtggactta

SEQ ID NO: 1676 - DNA, 16 bp, Artificial sequence
  Synthetic oligonucleotide
tgctctctggtcacac

SEQ ID NO: 1677 - DNA, 16 bp, Artificial sequence
  Synthetic oligonucleotide
tatcccccagagccat

SEQ ID NO: 1678 - DNA, 16 bp, Artificial sequence
  Synthetic oligonucleotide
aaggtgagagggcact

SEQ ID NO: 1679 - DNA, 16 bp, Artificial sequence
  Synthetic oligonucleotide
gttttaacctcaccct

SEQ ID NO: 1680 - DNA, 16 bp, Artificial sequence
  Synthetic oligonucleotide
ccttccactgaccttc

SEQ ID NO: 1681 - DNA, 16 bp, Artificial sequence
  Synthetic oligonucleotide
gacactagcctaagcc

SEQ ID NO: 1682 - DNA, 16 bp, Artificial sequence
  Synthetic oligonucleotide
ggttagccctcagcct

SEQ ID NO: 1683 - DNA, 16 bp, Artificial sequence
  Synthetic oligonucleotide
tatgaaggttggacca

SEQ ID NO: 1684 - DNA, 16 bp, Artificial sequence
  Synthetic oligonucleotide
caaccagctcacctga

SEQ ID NO: 1685 - DNA, 16 bp, Artificial sequence
  Synthetic oligonucleotide
gggctccaaggctctc

SEQ ID NO: 1686 - DNA, 16 bp, Artificial sequence
  Synthetic oligonucleotide
agctgttacatgccaa

SEQ ID NO: 1687 - DNA, 16 bp, Artificial sequence
  Synthetic oligonucleotide
ggcccagaggttatag

SEQ ID NO: 1688 - DNA, 16 bp, Artificial sequence
  Synthetic oligonucleotide
gtccttagacccctca

SEQ ID NO: 1689 - DNA, 16 bp, Artificial sequence
  Synthetic oligonucleotide
gccctggctagagaca

SEQ ID NO: 1690 - DNA, 16 bp, Artificial sequence
  Synthetic oligonucleotide
catccagcagctggac

SEQ ID NO: 1691 - DNA, 16 bp, Artificial sequence
  Synthetic oligonucleotide
gactgaggtcatcaca

SEQ ID NO: 1692 - DNA, 16 bp, Artificial sequence
  Synthetic oligonucleotide
ggccaggcacatcatg

SEQ ID NO: 1693 - DNA, 16 bp, Artificial sequence
  Synthetic oligonucleotide
ggagctcattgagcca

SEQ ID NO: 1694 - DNA, 16 bp, Artificial sequence
  Synthetic oligonucleotide
gtgcccattgctgtgt

SEQ ID NO: 1695 - DNA, 16 bp, Artificial sequence
  Synthetic oligonucleotide
ccaagtgtggcttcag

SEQ ID NO: 1696 - DNA, 16 bp, Artificial sequence
  Synthetic oligonucleotide
ccaccctttatacgca

SEQ ID NO: 1697 - DNA, 16 bp, Artificial sequence
  Synthetic oligonucleotide
cagtaaccccaaggga

SEQ ID NO: 1698 - DNA, 16 bp, Artificial sequence
  Synthetic oligonucleotide
ccccaccttatatggg

SEQ ID NO: 1699 - DNA, 16 bp, Artificial sequence
  Synthetic oligonucleotide
aggccctttttacatg

SEQ ID NO: 1700 - DNA, 16 bp, Artificial sequence
  Synthetic oligonucleotide
tcaataagtccctagg

SEQ ID NO: 1701 - DNA, 16 bp, Artificial sequence
  Synthetic oligonucleotide
ggcattgagtgactgc

SEQ ID NO: 1702 - DNA, 16 bp, Artificial sequence
  Synthetic oligonucleotide
ataatgccttctcagc

SEQ ID NO: 1703 - DNA, 16 bp, Artificial sequence
  Synthetic oligonucleotide
gtgaggcatttagccc

SEQ ID NO: 1704 - DNA, 16 bp, Artificial sequence
  Synthetic oligonucleotide
gctcttgtgttgggta

SEQ ID NO: 1705 - DNA, 16 bp, Artificial sequence
  Synthetic oligonucleotide
tgtgcaggaggtctca

SEQ ID NO: 1706 - DNA, 16 bp, Artificial sequence
  Synthetic oligonucleotide
tggagagtcttgtctc

SEQ ID NO: 1707 - DNA, 16 bp, Artificial sequence
  Synthetic oligonucleotide
gtgacccacccaagag

SEQ ID NO: 1708 - DNA, 16 bp, Artificial sequence
  Synthetic oligonucleotide
gttgtagctagtgttc

SEQ ID NO: 1709 - DNA, 16 bp, Artificial sequence
  Synthetic oligonucleotide
gccttagtttgtgcca

SEQ ID NO: 1710 - DNA, 16 bp, Artificial sequence
  Synthetic oligonucleotide
gccccagctgagaatt

SEQ ID NO: 1711 - DNA, 16 bp, Artificial sequence
  Synthetic oligonucleotide
acaacaatccagggtg

SEQ ID NO: 1712 - DNA, 16 bp, Artificial sequence
  Synthetic oligonucleotide
ctcccctggaagtcac

SEQ ID NO: 1713 - DNA, 16 bp, Artificial sequence
  Synthetic oligonucleotide
gccctcatggctcaag

SEQ ID NO: 1714 - DNA, 16 bp, Artificial sequence
  Synthetic oligonucleotide
tcagcagatagggagc

SEQ ID NO: 1715 - DNA, 16 bp, Artificial sequence
  Synthetic oligonucleotide
gaatgcggtgatcagg

SEQ ID NO: 1716 - DNA, 16 bp, Artificial sequence
  Synthetic oligonucleotide
ctgagagaattggccc

SEQ ID NO: 1717 - DNA, 16 bp, Artificial sequence
  Synthetic oligonucleotide
aggcacattgttacca

SEQ ID NO: 1718 - DNA, 16 bp, Artificial sequence
  Synthetic oligonucleotide
gggaggcactagagaa

SEQ ID NO: 1719 - DNA, 16 bp, Artificial sequence
  Synthetic oligonucleotide
tacagtaacacatccc

SEQ ID NO: 1720 - DNA, 16 bp, Artificial sequence
  Synthetic oligonucleotide
gaagctcagcctgatc

SEQ ID NO: 1721 - DNA, 16 bp, Artificial sequence
  Synthetic oligonucleotide
cttgcctgacaaccta

SEQ ID NO: 1722 - DNA, 16 bp, Artificial sequence
  Synthetic oligonucleotide
gcctacctgcttttgc

SEQ ID NO: 1723 - DNA, 16 bp, Artificial sequence
  Synthetic oligonucleotide
tttcccaaccacttag

SEQ ID NO: 1724 - DNA, 16 bp, Artificial sequence
  Synthetic oligonucleotide
tctcctatttcagtta

SEQ ID NO: 1725 - DNA, 16 bp, Artificial sequence
  Synthetic oligonucleotide
gggtgatggatgaact

SEQ ID NO: 1726 - DNA, 16 bp, Artificial sequence
  Synthetic oligonucleotide
acactgctggtagtga

SEQ ID NO: 1727 - DNA, 16 bp, Artificial sequence
  Synthetic oligonucleotide
acccaactagcctgtc

SEQ ID NO: 1728 - DNA, 16 bp, Artificial sequence
  Synthetic oligonucleotide
gagacctgctgcctga

SEQ ID NO: 1729 - DNA, 16 bp, Artificial sequence
  Synthetic oligonucleotide
acatctcttgggaggt

SEQ ID NO: 1730 - DNA, 16 bp, Artificial sequence
  Synthetic oligonucleotide
acatagtacccctcca

SEQ ID NO: 1731 - DNA, 16 bp, Artificial sequence
  Synthetic oligonucleotide
ctctcaagtacctgcc

SEQ ID NO: 1732 - DNA, 16 bp, Artificial sequence
  Synthetic oligonucleotide
tttgtacccaaccccc

SEQ ID NO: 1733 - DNA, 16 bp, Artificial sequence
  Synthetic oligonucleotide
aggcccacataaatgc

SEQ ID NO: 1734 - DNA, 16 bp, Artificial sequence
  Synthetic oligonucleotide
gagcatcccctacact

SEQ ID NO: 1735 - DNA, 16 bp, Artificial sequence
  Synthetic oligonucleotide
gctgggcctttagctg

SEQ ID NO: 1736 - DNA, 16 bp, Artificial sequence
  Synthetic oligonucleotide
ttggtcaattgggcag

SEQ ID NO: 1737 - DNA, 16 bp, Artificial sequence
  Synthetic oligonucleotide
gtctcatgaggcctat

SEQ ID NO: 1738 - DNA, 16 bp, Artificial sequence
  Synthetic oligonucleotide
ggaggtgggatcccac

SEQ ID NO: 1739 - DNA, 16 bp, Artificial sequence
  Synthetic oligonucleotide
gcccactacctagcac

SEQ ID NO: 1740 - DNA, 16 bp, Artificial sequence
  Synthetic oligonucleotide
cccagctggctggtcg

SEQ ID NO: 1741 - DNA, 16 bp, Artificial sequence
  Synthetic oligonucleotide
gcaccaggtctcctgt

SEQ ID NO: 1742 - DNA, 16 bp, Artificial sequence
  Synthetic oligonucleotide
gtctagaagcctaggg

SEQ ID NO: 1743 - DNA, 16 bp, Artificial sequence
  Synthetic oligonucleotide
gccgggtgttggtgca

SEQ ID NO: 1744 - DNA, 16 bp, Artificial sequence
  Synthetic oligonucleotide
ttggtgcctgtgttgc

SEQ ID NO: 1745 - DNA, 16 bp, Artificial sequence
  Synthetic oligonucleotide
tgcttctgatccctac

SEQ ID NO: 1746 - DNA, 16 bp, Artificial sequence
  Synthetic oligonucleotide
gttcccaggaggctta

SEQ ID NO: 1747 - DNA, 16 bp, Artificial sequence
  Synthetic oligonucleotide
aggcccctagagtcta

SEQ ID NO: 1748 - DNA, 16 bp, Artificial sequence
  Synthetic oligonucleotide
tggtgtgcccagactt

SEQ ID NO: 1749 - DNA, 16 bp, Artificial sequence
  Synthetic oligonucleotide
gatggctaacccactg

SEQ ID NO: 1750 - DNA, 16 bp, Artificial sequence
  Synthetic oligonucleotide
cccccaaaagttgccc

SEQ ID NO: 1751 - DNA, 16 bp, Artificial sequence
  Synthetic oligonucleotide
tagggtgttccagatc

SEQ ID NO: 1752 - DNA, 16 bp, Artificial sequence
  Synthetic oligonucleotide
gtaccatgaagctctg

SEQ ID NO: 1753 - DNA, 16 bp, Artificial sequence
  Synthetic oligonucleotide
cttggacttggaccat

SEQ ID NO: 1754 - DNA, 16 bp, Artificial sequence
  Synthetic oligonucleotide
gtgcatagggcctgtc

SEQ ID NO: 1755 - DNA, 16 bp, Artificial sequence
  Synthetic oligonucleotide
cctcacctgaacaccc

SEQ ID NO: 1756 - DNA, 16 bp, Artificial sequence
  Synthetic oligonucleotide
atgcctccccgcaact

SEQ ID NO: 1757 - DNA, 16 bp, Artificial sequence
  Synthetic oligonucleotide
ttgtgcttgggtgtac

SEQ ID NO: 1758 - DNA, 16 bp, Artificial sequence
  Synthetic oligonucleotide
aggcttcatgtgaggt

SEQ ID NO: 1759 - DNA, 16 bp, Artificial sequence
  Synthetic oligonucleotide
tgtaaaaggtcctccc

SEQ ID NO: 1760 - DNA, 16 bp, Artificial sequence
  Synthetic oligonucleotide
gacctgtgcagcaggt

SEQ ID NO: 1761 - DNA, 16 bp, Artificial sequence
  Synthetic oligonucleotide
tcctcttggagatcca

SEQ ID NO: 1762 - DNA, 16 bp, Artificial sequence
  Synthetic oligonucleotide
aggtcataggactgct

SEQ ID NO: 1763 - DNA, 16 bp, Artificial sequence
  Synthetic oligonucleotide
gaaggtcagactaggg

SEQ ID NO: 1764 - DNA, 16 bp, Artificial sequence
  Synthetic oligonucleotide
tctgtagactgcccag

SEQ ID NO: 1765 - DNA, 16 bp, Artificial sequence
  Synthetic oligonucleotide
gtccctctattcccct

SEQ ID NO: 1766 - DNA, 16 bp, Artificial sequence
  Synthetic oligonucleotide
aattgccatgctccca

SEQ ID NO: 1767 - DNA, 16 bp, Artificial sequence
  Synthetic oligonucleotide
gatgaccttcctccaa

SEQ ID NO: 1768 - DNA, 16 bp, Artificial sequence
  Synthetic oligonucleotide
gtttccagtagcacct

SEQ ID NO: 1769 - DNA, 16 bp, Artificial sequence
  Synthetic oligonucleotide
ggccttgagctgatgg

SEQ ID NO: 1770 - DNA, 16 bp, Artificial sequence
  Synthetic oligonucleotide
tatccctaatcaggct

SEQ ID NO: 1771 - DNA, 16 bp, Artificial sequence
  Synthetic oligonucleotide
ggtgtccacatcccgg

SEQ ID NO: 1772 - DNA, 16 bp, Artificial sequence
  Synthetic oligonucleotide
agctggacaggccata

SEQ ID NO: 1773 - DNA, 16 bp, Artificial sequence
  Synthetic oligonucleotide
ggtaatcacccagaga

SEQ ID NO: 1774 - DNA, 16 bp, Artificial sequence
  Synthetic oligonucleotide
gcgctaagtctgctgt

SEQ ID NO: 1775 - DNA, 16 bp, Artificial sequence
  Synthetic oligonucleotide
cctcaaatcttgccca

SEQ ID NO: 1776 - DNA, 16 bp, Artificial sequence
  Synthetic oligonucleotide
atccagacctggcaga

SEQ ID NO: 1777 - DNA, 16 bp, Artificial sequence
  Synthetic oligonucleotide
atccctgctcaagtgc

SEQ ID NO: 1778 - DNA, 16 bp, Artificial sequence
  Synthetic oligonucleotide
caggcactccttggaa

SEQ ID NO: 1779 - DNA, 16 bp, Artificial sequence
  Synthetic oligonucleotide
agctgaggtatccctc

SEQ ID NO: 1780 - DNA, 16 bp, Artificial sequence
  Synthetic oligonucleotide
gggcccagcaagtctt

SEQ ID NO: 1781 - DNA, 16 bp, Artificial sequence
  Synthetic oligonucleotide
gttttgtcagtgtgca

SEQ ID NO: 1782 - DNA, 16 bp, Artificial sequence
  Synthetic oligonucleotide
gtgacctgctgaactc

SEQ ID NO: 1783 - DNA, 16 bp, Artificial sequence
  Synthetic oligonucleotide
ggctgaactgtgcacc

SEQ ID NO: 1784 - DNA, 16 bp, Artificial sequence
  Synthetic oligonucleotide
gggtggtcccactcct

SEQ ID NO: 1785 - DNA, 16 bp, Artificial sequence
  Synthetic oligonucleotide
gaggaatcctgggccc

SEQ ID NO: 1786 - DNA, 16 bp, Artificial sequence
  Synthetic oligonucleotide
atgacaagctaggtgc

SEQ ID NO: 1787 - DNA, 16 bp, Artificial sequence
  Synthetic oligonucleotide
ttgccagacagggcac

SEQ ID NO: 1788 - DNA, 16 bp, Artificial sequence
  Synthetic oligonucleotide
agacccctcccactat

SEQ ID NO: 1789 - DNA, 16 bp, Artificial sequence
  Synthetic oligonucleotide
ggtgctgggtgaccgg

SEQ ID NO: 1790 - DNA, 16 bp, Artificial sequence
  Synthetic oligonucleotide
ggccaaacggtgccct

SEQ ID NO: 1791 - DNA, 16 bp, Artificial sequence
  Synthetic oligonucleotide
tgggtgaatagcaacc

SEQ ID NO: 1792 - DNA, 16 bp, Artificial sequence
  Synthetic oligonucleotide
gcccccaaggaagtga

SEQ ID NO: 1793 - DNA, 16 bp, Artificial sequence
  Synthetic oligonucleotide
caggcttcatgtgtgg

SEQ ID NO: 1794 - DNA, 16 bp, Artificial sequence
  Synthetic oligonucleotide
ctgtcagtgctttggt

SEQ ID NO: 1795 - DNA, 16 bp, Artificial sequence
  Synthetic oligonucleotide
gagtaccctggcaggt

SEQ ID NO: 1796 - DNA, 16 bp, Artificial sequence
  Synthetic oligonucleotide
tagctagcacctgggt

SEQ ID NO: 1797 - DNA, 16 bp, Artificial sequence
  Synthetic oligonucleotide
ggcaaacctttgagcc

SEQ ID NO: 1798 - DNA, 16 bp, Artificial sequence
  Synthetic oligonucleotide
gctatcattggagcag

SEQ ID NO: 1799 - DNA, 16 bp, Artificial sequence
  Synthetic oligonucleotide
cctctgagtactccct

SEQ ID NO: 1800 - DNA, 16 bp, Artificial sequence
  Synthetic oligonucleotide
agctgaaggcaaccag

SEQ ID NO: 1801 - DNA, 16 bp, Artificial sequence
  Synthetic oligonucleotide
gggcagttttccatag

SEQ ID NO: 1802 - DNA, 16 bp, Artificial sequence
  Synthetic oligonucleotide
ggtcctacctctgaca

SEQ ID NO: 1803 - DNA, 16 bp, Artificial sequence
  Synthetic oligonucleotide
ggctgccttagggtgg

SEQ ID NO: 1804 - DNA, 16 bp, Artificial sequence
  Synthetic oligonucleotide
cgcacctcccccacta

SEQ ID NO: 1805 - DNA, 16 bp, Artificial sequence
  Synthetic oligonucleotide
gcttattggtccatgg

SEQ ID NO: 1806 - DNA, 16 bp, Artificial sequence
  Synthetic oligonucleotide
aaccgcagagccccca

SEQ ID NO: 1807 - DNA, 16 bp, Artificial sequence
  Synthetic oligonucleotide
gggcttgttctgccaa

SEQ ID NO: 1808 - DNA, 16 bp, Artificial sequence
  Synthetic oligonucleotide
gggacctgcgctgact

SEQ ID NO: 1809 - DNA, 16 bp, Artificial sequence
  Synthetic oligonucleotide
ctttcacctggtgact

SEQ ID NO: 1810 - DNA, 16 bp, Artificial sequence
  Synthetic oligonucleotide
agcttgagggagtata

SEQ ID NO: 1811 - DNA, 16 bp, Artificial sequence
  Synthetic oligonucleotide
gcctgctcaattgagg

SEQ ID NO: 1812 - DNA, 16 bp, Artificial sequence
  Synthetic oligonucleotide
atagcagctggctgcc

SEQ ID NO: 1813 - DNA, 16 bp, Artificial sequence
  Synthetic oligonucleotide
aaaagcttggcacccc

SEQ ID NO: 1814 - DNA, 16 bp, Artificial sequence
  Synthetic oligonucleotide
cctggcaagaagggcc

SEQ ID NO: 1815 - DNA, 16 bp, Artificial sequence
  Synthetic oligonucleotide
ttagcccatctatccc

SEQ ID NO: 1816 - DNA, 16 bp, Artificial sequence
  Synthetic oligonucleotide
gtggtctccctgtgcc

SEQ ID NO: 1817 - DNA, 16 bp, Artificial sequence
  Synthetic oligonucleotide
agccctctctggcaaa

SEQ ID NO: 1818 - DNA, 16 bp, Artificial sequence
  Synthetic oligonucleotide
ttactgtggcccgagt

SEQ ID NO: 1819 - DNA, 16 bp, Artificial sequence
  Synthetic oligonucleotide
gtagactcctagggtc

SEQ ID NO: 1820 - DNA, 16 bp, Artificial sequence
  Synthetic oligonucleotide
cctccagttagtgtgc

SEQ ID NO: 1821 - DNA, 16 bp, Artificial sequence
  Synthetic oligonucleotide
gtgggtggccaacagg

SEQ ID NO: 1822 - DNA, 16 bp, Artificial sequence
  Synthetic oligonucleotide
gggattccctggtagc

SEQ ID NO: 1823 - DNA, 16 bp, Artificial sequence
  Synthetic oligonucleotide
gtgagaccggcctttg

SEQ ID NO: 1824 - DNA, 16 bp, Artificial sequence
  Synthetic oligonucleotide
actggcacccacttgg

SEQ ID NO: 1825 - DNA, 16 bp, Artificial sequence
  Synthetic oligonucleotide
attggcctaatgcccc

SEQ ID NO: 1826 - DNA, 16 bp, Artificial sequence
  Synthetic oligonucleotide
aggctatacattccag

SEQ ID NO: 1827 - DNA, 16 bp, Artificial sequence
  Synthetic oligonucleotide
ggtggcagctaggtgg

SEQ ID NO: 1828 - DNA, 16 bp, Artificial sequence
  Synthetic oligonucleotide
tccacagttggcactg

SEQ ID NO: 1829 - DNA, 16 bp, Artificial sequence
  Synthetic oligonucleotide
tgggccttagattgta

SEQ ID NO: 1830 - DNA, 16 bp, Artificial sequence
  Synthetic oligonucleotide
tgtcttcctggtggcc

SEQ ID NO: 1831 - DNA, 16 bp, Artificial sequence
  Synthetic oligonucleotide
cccgcctctccagcaa

SEQ ID NO: 1832 - DNA, 16 bp, Artificial sequence
  Synthetic oligonucleotide
gcagcagccaataagt

SEQ ID NO: 1833 - DNA, 16 bp, Artificial sequence
  Synthetic oligonucleotide
ttgtatcctggcccct

SEQ ID NO: 1834 - DNA, 16 bp, Artificial sequence
  Synthetic oligonucleotide
gcctcatgggccttac

SEQ ID NO: 1835 - DNA, 16 bp, Artificial sequence
  Synthetic oligonucleotide
ggatgccagtcttggc

SEQ ID NO: 1836 - DNA, 16 bp, Artificial sequence
  Synthetic oligonucleotide
ctgctctcagtacctc

SEQ ID NO: 1837 - DNA, 16 bp, Artificial sequence
  Synthetic oligonucleotide
acccaagaagtcacct

SEQ ID NO: 1838 - DNA, 16 bp, Artificial sequence
  Synthetic oligonucleotide
gcctcaagccctaccc

SEQ ID NO: 1839 - DNA, 16 bp, Artificial sequence
  Synthetic oligonucleotide
agctccagcctataga

SEQ ID NO: 1840 - DNA, 16 bp, Artificial sequence
  Synthetic oligonucleotide
ggtccacatggcccta

SEQ ID NO: 1841 - DNA, 16 bp, Artificial sequence
  Synthetic oligonucleotide
caggcccaggattgtc

SEQ ID NO: 1842 - DNA, 16 bp, Artificial sequence
  Synthetic oligonucleotide
gggcctgctttgcagc

SEQ ID NO: 1843 - DNA, 16 bp, Artificial sequence
  Synthetic oligonucleotide
actcctctctttaggc

SEQ ID NO: 1844 - DNA, 16 bp, Artificial sequence
  Synthetic oligonucleotide
ctgggtaacagtcctc

SEQ ID NO: 1845 - DNA, 16 bp, Artificial sequence
  Synthetic oligonucleotide
actgtatggtttccac

SEQ ID NO: 1846 - DNA, 16 bp, Artificial sequence
  Synthetic oligonucleotide
gccaaagatagctctt

SEQ ID NO: 1847 - DNA, 16 bp, Artificial sequence
  Synthetic oligonucleotide
ggcattggaagttggt

SEQ ID NO: 1848 - DNA, 16 bp, Artificial sequence
  Synthetic oligonucleotide
cccttcctgaccttac

SEQ ID NO: 1849 - DNA, 16 bp, Artificial sequence
  Synthetic oligonucleotide
ttaccctctattcacc

SEQ ID NO: 1850 - DNA, 16 bp, Artificial sequence
  Synthetic oligonucleotide
ggcaccccaggccggg

SEQ ID NO: 1851 - DNA, 16 bp, Artificial sequence
  Synthetic oligonucleotide
cagcagctagttcccc

SEQ ID NO: 1852 - DNA, 16 bp, Artificial sequence
  Synthetic oligonucleotide
gtgggcactagtgtgt

SEQ ID NO: 1853 - DNA, 16 bp, Artificial sequence
  Synthetic oligonucleotide
tgcccttgtcagggca

SEQ ID NO: 1854 - DNA, 16 bp, Artificial sequence
  Synthetic oligonucleotide
gcagataggctcagca

SEQ ID NO: 1855 - DNA, 16 bp, Artificial sequence
  Synthetic oligonucleotide
ccctagcccttagcac

SEQ ID NO: 1856 - DNA, 16 bp, Artificial sequence
  Synthetic oligonucleotide
actggaatggccctct

SEQ ID NO: 1857 - DNA, 16 bp, Artificial sequence
  Synthetic oligonucleotide
tttgctcatgctcaca

SEQ ID NO: 1858 - DNA, 16 bp, Artificial sequence
  Synthetic oligonucleotide
gcctttgtgtgtcact

SEQ ID NO: 1859 - DNA, 16 bp, Artificial sequence
  Synthetic oligonucleotide
tatgtggtagcatgtc

SEQ ID NO: 1860 - DNA, 16 bp, Artificial sequence
  Synthetic oligonucleotide
ccccaggaagttggcc

SEQ ID NO: 1861 - DNA, 16 bp, Artificial sequence
  Synthetic oligonucleotide
tagctgtcaaggccct

SEQ ID NO: 1862 - DNA, 16 bp, Artificial sequence
  Synthetic oligonucleotide
cctagtcagccactag

SEQ ID NO: 1863 - DNA, 16 bp, Artificial sequence
  Synthetic oligonucleotide
agactccccatcagcc

SEQ ID NO: 1864 - DNA, 16 bp, Artificial sequence
  Synthetic oligonucleotide
gtgaagggccttcatc

SEQ ID NO: 1865 - DNA, 16 bp, Artificial sequence
  Synthetic oligonucleotide
ggttgagagtccaatg

SEQ ID NO: 1866 - DNA, 16 bp, Artificial sequence
  Synthetic oligonucleotide
cagctaattccctcat

SEQ ID NO: 1867 - DNA, 16 bp, Artificial sequence
  Synthetic oligonucleotide
ttgtgtctcaacccac

SEQ ID NO: 1868 - DNA, 16 bp, Artificial sequence
  Synthetic oligonucleotide
ggctatgctgcatgct

SEQ ID NO: 1869 - DNA, 16 bp, Artificial sequence
  Synthetic oligonucleotide
ccccatacccagtgga

SEQ ID NO: 1870 - DNA, 16 bp, Artificial sequence
  Synthetic oligonucleotide
ggtggttttcctccct

SEQ ID NO: 1871 - DNA, 16 bp, Artificial sequence
  Synthetic oligonucleotide
gagcctgcccaacttt

SEQ ID NO: 1872 - DNA, 16 bp, Artificial sequence
  Synthetic oligonucleotide
tgatgcccaagagtga

SEQ ID NO: 1873 - DNA, 16 bp, Artificial sequence
  Synthetic oligonucleotide
ttccctctgcgaacat

SEQ ID NO: 1874 - DNA, 16 bp, Artificial sequence
  Synthetic oligonucleotide
gttccatctcaatcca

SEQ ID NO: 1875 - DNA, 16 bp, Artificial sequence
  Synthetic oligonucleotide
acggccactccactgg

SEQ ID NO: 1876 - DNA, 16 bp, Artificial sequence
  Synthetic oligonucleotide
tggaagtggttccaga

SEQ ID NO: 1877 - DNA, 16 bp, Artificial sequence
  Synthetic oligonucleotide
ttgccccagaccaaca

SEQ ID NO: 1878 - DNA, 16 bp, Artificial sequence
  Synthetic oligonucleotide
gaggttgtggaggtgc

SEQ ID NO: 1879 - DNA, 16 bp, Artificial sequence
  Synthetic oligonucleotide
gagttgctgtgtgtga

SEQ ID NO: 1880 - DNA, 16 bp, Artificial sequence
  Synthetic oligonucleotide
catgtcagaggtgtcc

SEQ ID NO: 1881 - DNA, 16 bp, Artificial sequence
  Synthetic oligonucleotide
aggtaaggatcatggc

SEQ ID NO: 1882 - DNA, 16 bp, Artificial sequence
  Synthetic oligonucleotide
gttcagttgcatcacg

SEQ ID NO: 1883 - DNA, 16 bp, Artificial sequence
  Synthetic oligonucleotide
gcccagctagccaccc

SEQ ID NO: 1884 - DNA, 16 bp, Artificial sequence
  Synthetic oligonucleotide
ccttagcagccaggcc

SEQ ID NO: 1885 - DNA, 16 bp, Artificial sequence
  Synthetic oligonucleotide
gcacttagggttttgc

SEQ ID NO: 1886 - DNA, 16 bp, Artificial sequence
  Synthetic oligonucleotide
gttgaactttccctac

SEQ ID NO: 1887 - DNA, 16 bp, Artificial sequence
  Synthetic oligonucleotide
tgactccttgagacag

SEQ ID NO: 1888 - DNA, 16 bp, Artificial sequence
  Synthetic oligonucleotide
tgcgctggcttagcaa

SEQ ID NO: 1889 - DNA, 16 bp, Artificial sequence
  Synthetic oligonucleotide
ggcctaacatcagcag

SEQ ID NO: 1890 - DNA, 16 bp, Artificial sequence
  Synthetic oligonucleotide
actcctcccagttagc

SEQ ID NO: 1891 - DNA, 16 bp, Artificial sequence
  Synthetic oligonucleotide
accagtggccaatgtc

SEQ ID NO: 1892 - DNA, 16 bp, Artificial sequence
  Synthetic oligonucleotide
gcctagacacagtagg

SEQ ID NO: 1893 - DNA, 16 bp, Artificial sequence
  Synthetic oligonucleotide
tattctccccctaggg

SEQ ID NO: 1894 - DNA, 16 bp, Artificial sequence
  Synthetic oligonucleotide
gacggccttgggcaca

SEQ ID NO: 1895 - DNA, 16 bp, Artificial sequence
  Synthetic oligonucleotide
gcaggctgtattagca

SEQ ID NO: 1896 - DNA, 16 bp, Artificial sequence
  Synthetic oligonucleotide
accccctatcctgcac

SEQ ID NO: 1897 - DNA, 16 bp, Artificial sequence
  Synthetic oligonucleotide
tcctccatacctagag

SEQ ID NO: 1898 - DNA, 16 bp, Artificial sequence
  Synthetic oligonucleotide
gataggtgcccactgt

SEQ ID NO: 1899 - DNA, 16 bp, Artificial sequence
  Synthetic oligonucleotide
gtcagttctggctagg

SEQ ID NO: 1900 - DNA, 16 bp, Artificial sequence
  Synthetic oligonucleotide
gcctgaacttacaagc

SEQ ID NO: 1901 - DNA, 16 bp, Artificial sequence
  Synthetic oligonucleotide
accctgggctgacctt

SEQ ID NO: 1902 - DNA, 16 bp, Artificial sequence
  Synthetic oligonucleotide
ggacctggacaagcaa

SEQ ID NO: 1903 - DNA, 16 bp, Artificial sequence
  Synthetic oligonucleotide
ctccttgcgagagagg

SEQ ID NO: 1904 - DNA, 16 bp, Artificial sequence
  Synthetic oligonucleotide
agagttgacatgggca

SEQ ID NO: 1905 - DNA, 16 bp, Artificial sequence
  Synthetic oligonucleotide
cactaggtccctgacc

SEQ ID NO: 1906 - DNA, 16 bp, Artificial sequence
  Synthetic oligonucleotide
cactctcttgggctgt

SEQ ID NO: 1907 - DNA, 16 bp, Artificial sequence
  Synthetic oligonucleotide
agggacctgcattcca

SEQ ID NO: 1908 - DNA, 16 bp, Artificial sequence
  Synthetic oligonucleotide
ttcaccacccattggg

SEQ ID NO: 1909 - DNA, 16 bp, Artificial sequence
  Synthetic oligonucleotide
atctggtctgagggcc

SEQ ID NO: 1910 - DNA, 16 bp, Artificial sequence
  Synthetic oligonucleotide
gacatgcaattgaccc

SEQ ID NO: 1911 - DNA, 16 bp, Artificial sequence
  Synthetic oligonucleotide
gtgtgcagcagactgt

SEQ ID NO: 1912 - DNA, 16 bp, Artificial sequence
  Synthetic oligonucleotide
gacagtccagctgcaa

SEQ ID NO: 1913 - DNA, 16 bp, Artificial sequence
  Synthetic oligonucleotide
cctgcggcagtgaaga

SEQ ID NO: 1914 - DNA, 16 bp, Artificial sequence
  Synthetic oligonucleotide
ctctgaggataaccct

SEQ ID NO: 1915 - DNA, 16 bp, Artificial sequence
  Synthetic oligonucleotide
gttcccagctccccaa

SEQ ID NO: 1916 - DNA, 16 bp, Artificial sequence
  Synthetic oligonucleotide
tagggtcagtgtccca

SEQ ID NO: 1917 - DNA, 16 bp, Artificial sequence
  Synthetic oligonucleotide
ggcgagcctctcagcc

SEQ ID NO: 1918 - DNA, 16 bp, Artificial sequence
  Synthetic oligonucleotide
gactcatccaggcagt

SEQ ID NO: 1919 - DNA, 16 bp, Artificial sequence
  Synthetic oligonucleotide
tccctcccttaggcac

SEQ ID NO: 1920 - DNA, 16 bp, Artificial sequence
  Synthetic oligonucleotide
gaggagccaggcatat

SEQ ID NO: 1921 - DNA, 16 bp, Artificial sequence
  Synthetic oligonucleotide
caccaacgaagtcccc

SEQ ID NO: 1922 - DNA, 16 bp, Artificial sequence
  Synthetic oligonucleotide
gctggcagtcaccaaa

SEQ ID NO: 1923 - DNA, 16 bp, Artificial sequence
  Synthetic oligonucleotide
gcccacaccattgagc

SEQ ID NO: 1924 - DNA, 16 bp, Artificial sequence
  Synthetic oligonucleotide
agtgagatgccctggt

SEQ ID NO: 1925 - DNA, 16 bp, Artificial sequence
  Synthetic oligonucleotide
cactggcagttagacc

SEQ ID NO: 1926 - DNA, 16 bp, Artificial sequence
  Synthetic oligonucleotide
actctggccactagta

SEQ ID NO: 1927 - DNA, 16 bp, Artificial sequence
  Synthetic oligonucleotide
ggtagggtggccacat

SEQ ID NO: 1928 - DNA, 16 bp, Artificial sequence
  Synthetic oligonucleotide
gagccatgtctaggca

SEQ ID NO: 1929 - DNA, 16 bp, Artificial sequence
  Synthetic oligonucleotide
cagactgaaacccacc

SEQ ID NO: 1930 - DNA, 16 bp, Artificial sequence
  Synthetic oligonucleotide
tatggtccagccacca

SEQ ID NO: 1931 - DNA, 16 bp, Artificial sequence
  Synthetic oligonucleotide
tacctcctctgttggt

SEQ ID NO: 1932 - DNA, 16 bp, Artificial sequence
  Synthetic oligonucleotide
acacctcagtcatgat

SEQ ID NO: 1933 - DNA, 16 bp, Artificial sequence
  Synthetic oligonucleotide
aacaggcttcaagagg

SEQ ID NO: 1934 - DNA, 16 bp, Artificial sequence
  Synthetic oligonucleotide
gtactactggccatgt

SEQ ID NO: 1935 - DNA, 16 bp, Artificial sequence
  Synthetic oligonucleotide
ctgcaggcggttgcta

SEQ ID NO: 1936 - DNA, 16 bp, Artificial sequence
  Synthetic oligonucleotide
gtctgttgccaagagc

SEQ ID NO: 1937 - DNA, 16 bp, Artificial sequence
  Synthetic oligonucleotide
ccctgggtcacttaag

SEQ ID NO: 1938 - DNA, 16 bp, Artificial sequence
  Synthetic oligonucleotide
cctgtccttgcttgca

SEQ ID NO: 1939 - DNA, 16 bp, Artificial sequence
  Synthetic oligonucleotide
gcccagcttatcctaa

SEQ ID NO: 1940 - DNA, 16 bp, Artificial sequence
  Synthetic oligonucleotide
agtagagcctttgcct

SEQ ID NO: 1941 - DNA, 16 bp, Artificial sequence
  Synthetic oligonucleotide
ctgtctcttggcccat

SEQ ID NO: 1942 - DNA, 16 bp, Artificial sequence
  Synthetic oligonucleotide
ggcccaaatcttgagt

SEQ ID NO: 1943 - DNA, 16 bp, Artificial sequence
  Synthetic oligonucleotide
gcttgttacagcacta

SEQ ID NO: 1944 - DNA, 16 bp, Artificial sequence
  Synthetic oligonucleotide
actttggcccagagat

SEQ ID NO: 1945 - DNA, 16 bp, Artificial sequence
  Synthetic oligonucleotide
gcagtcaggtcagctg

SEQ ID NO: 1946 - DNA, 16 bp, Artificial sequence
  Synthetic oligonucleotide
gccttgtcctactacc

SEQ ID NO: 1947 - DNA, 16 bp, Artificial sequence
  Synthetic oligonucleotide
ggctctgctattggcc

SEQ ID NO: 1948 - DNA, 16 bp, Artificial sequence
  Synthetic oligonucleotide
cttatagagccttgcc

SEQ ID NO: 1949 - DNA, 16 bp, Artificial sequence
  Synthetic oligonucleotide
ggaagggcccaaatat

SEQ ID NO: 1950 - DNA, 16 bp, Artificial sequence
  Synthetic oligonucleotide
gatctactcctactgc

SEQ ID NO: 1951 - DNA, 16 bp, Artificial sequence
  Synthetic oligonucleotide
gtcagcctgtgtctga

SEQ ID NO: 1952 - DNA, 16 bp, Artificial sequence
  Synthetic oligonucleotide
agcttcctccttacac

SEQ ID NO: 1953 - DNA, 16 bp, Artificial sequence
  Synthetic oligonucleotide
ctgctaagcccctacc

SEQ ID NO: 1954 - DNA, 16 bp, Artificial sequence
  Synthetic oligonucleotide
agaggtcaggtgcata

SEQ ID NO: 1955 - DNA, 16 bp, Artificial sequence
  Synthetic oligonucleotide
ttcagcctggttggga

SEQ ID NO: 1956 - DNA, 16 bp, Artificial sequence
  Synthetic oligonucleotide
gattgattgagctcct

SEQ ID NO: 1957 - DNA, 16 bp, Artificial sequence
  Synthetic oligonucleotide
atggactccctaggct

SEQ ID NO: 1958 - DNA, 16 bp, Artificial sequence
  Synthetic oligonucleotide
tactcaagggcccctc

SEQ ID NO: 1959 - DNA, 16 bp, Artificial sequence
  Synthetic oligonucleotide
ggcatatgtagcttgc

SEQ ID NO: 1960 - DNA, 16 bp, Artificial sequence
  Synthetic oligonucleotide
gagcttagatctgtgc

SEQ ID NO: 1961 - DNA, 16 bp, Artificial sequence
  Synthetic oligonucleotide
atgctcacggctgtgt

SEQ ID NO: 1962 - DNA, 16 bp, Artificial sequence
  Synthetic oligonucleotide
attgaaaggcccatca

SEQ ID NO: 1963 - DNA, 16 bp, Artificial sequence
  Synthetic oligonucleotide
caacccagtttgccgg

SEQ ID NO: 1964 - DNA, 16 bp, Artificial sequence
  Synthetic oligonucleotide
cagctattccctgttt

SEQ ID NO: 1965 - DNA, 16 bp, Artificial sequence
  Synthetic oligonucleotide
gctgtgtcacacttcc

SEQ ID NO: 1966 - DNA, 16 bp, Artificial sequence
  Synthetic oligonucleotide
gtccaaggatcacagc

SEQ ID NO: 1967 - DNA, 16 bp, Artificial sequence
  Synthetic oligonucleotide
gctaccactagagcct

SEQ ID NO: 1968 - DNA, 16 bp, Artificial sequence
  Synthetic oligonucleotide
gtttcagggcttatgt

SEQ ID NO: 1969 - DNA, 16 bp, Artificial sequence
  Synthetic oligonucleotide
tcccacacctattgaa

SEQ ID NO: 1970 - DNA, 16 bp, Artificial sequence
  Synthetic oligonucleotide
actgactagagagtcc

SEQ ID NO: 1971 - DNA, 16 bp, Artificial sequence
  Synthetic oligonucleotide
tccaaggctgatgtcc

SEQ ID NO: 1972 - DNA, 16 bp, Artificial sequence
  Synthetic oligonucleotide
tcccatggtggacatg

SEQ ID NO: 1973 - DNA, 16 bp, Artificial sequence
  Synthetic oligonucleotide
agtagctggcagaagg

SEQ ID NO: 1974 - DNA, 16 bp, Artificial sequence
  Synthetic oligonucleotide
ctgggagtgactacta

SEQ ID NO: 1975 - DNA, 16 bp, Artificial sequence
  Synthetic oligonucleotide
tggtatagctactggg

SEQ ID NO: 1976 - DNA, 16 bp, Artificial sequence
  Synthetic oligonucleotide
ctgtggtttggcaggt

SEQ ID NO: 1977 - DNA, 16 bp, Artificial sequence
  Synthetic oligonucleotide
gttctcacctgaacta

SEQ ID NO: 1978 - DNA, 16 bp, Artificial sequence
  Synthetic oligonucleotide
ataggctactggcagg

SEQ ID NO: 1979 - DNA, 16 bp, Artificial sequence
  Synthetic oligonucleotide
cccagctagctggagt

SEQ ID NO: 1980 - DNA, 16 bp, Artificial sequence
  Synthetic oligonucleotide
ggctggctctcaaagg

SEQ ID NO: 1981 - DNA, 16 bp, Artificial sequence
  Synthetic oligonucleotide
tggtgatactgtggca

SEQ ID NO: 1982 - DNA, 16 bp, Artificial sequence
  Synthetic oligonucleotide
gctgattttggtgcca

SEQ ID NO: 1983 - DNA, 16 bp, Artificial sequence
  Synthetic oligonucleotide
gctaatcttgcctcga

SEQ ID NO: 1984 - DNA, 16 bp, Artificial sequence
  Synthetic oligonucleotide
cactggtggctttcaa

SEQ ID NO: 1985 - DNA, 16 bp, Artificial sequence
  Synthetic oligonucleotide
gtccccttcttaagca

SEQ ID NO: 1986 - DNA, 16 bp, Artificial sequence
  Synthetic oligonucleotide
gccaggccaactgtgg

SEQ ID NO: 1987 - DNA, 16 bp, Artificial sequence
  Synthetic oligonucleotide
ggcccgttatggtgga

SEQ ID NO: 1988 - DNA, 16 bp, Artificial sequence
  Synthetic oligonucleotide
cctaaagtccaactcc

SEQ ID NO: 1989 - DNA, 16 bp, Artificial sequence
  Synthetic oligonucleotide
ccctatccagccttca

SEQ ID NO: 1990 - DNA, 16 bp, Artificial sequence
  Synthetic oligonucleotide
aagcatggcctctggc

SEQ ID NO: 1991 - DNA, 16 bp, Artificial sequence
  Synthetic oligonucleotide
taccctgcaccctcct

SEQ ID NO: 1992 - DNA, 16 bp, Artificial sequence
  Synthetic oligonucleotide
tccttagtagaatgcc

SEQ ID NO: 1993 - DNA, 16 bp, Artificial sequence
  Synthetic oligonucleotide
ttagccctgggagcac

SEQ ID NO: 1994 - DNA, 16 bp, Artificial sequence
  Synthetic oligonucleotide
gctgggtcaggtagcg

SEQ ID NO: 1995 - DNA, 16 bp, Artificial sequence
  Synthetic oligonucleotide
gggaggctctcaatct

SEQ ID NO: 1996 - DNA, 16 bp, Artificial sequence
  Synthetic oligonucleotide
gtaagtgcagaatgcc

SEQ ID NO: 1997 - DNA, 16 bp, Artificial sequence
  Synthetic oligonucleotide
tgccgaggcaggcacc

SEQ ID NO: 1998 - DNA, 16 bp, Artificial sequence
  Synthetic oligonucleotide
tccgtgtctaggaggt

SEQ ID NO: 1999 - DNA, 16 bp, Artificial sequence
  Synthetic oligonucleotide
gtctccctgcattgga

SEQ ID NO: 2000 - DNA, 16 bp, Artificial sequence
  Synthetic oligonucleotide
ccatatcactctcctc

SEQ ID NO: 2001 - DNA, 16 bp, Artificial sequence
  Synthetic oligonucleotide
cgaacaccttgagcca

SEQ ID NO: 2002 - DNA, 16 bp, Artificial sequence
  Synthetic oligonucleotide
ggcccagcttaagagg

SEQ ID NO: 2003 - DNA, 16 bp, Artificial sequence
  Synthetic oligonucleotide
ctgatactcctaatcc

SEQ ID NO: 2004 - DNA, 16 bp, Artificial sequence
  Synthetic oligonucleotide
gcctgtagggctgtgc

SEQ ID NO: 2005 - DNA, 16 bp, Artificial sequence
  Synthetic oligonucleotide
tgccctttctccctac

SEQ ID NO: 2006 - DNA, 16 bp, Artificial sequence
  Synthetic oligonucleotide
agtgcatgtcagtacc

SEQ ID NO: 2007 - DNA, 16 bp, Artificial sequence
  Synthetic oligonucleotide
tgctcctcagctgttg

SEQ ID NO: 2008 - DNA, 16 bp, Artificial sequence
  Synthetic oligonucleotide
gtttgggaccatccct

SEQ ID NO: 2009 - DNA, 16 bp, Artificial sequence
  Synthetic oligonucleotide
agtgctctctagggtc

SEQ ID NO: 2010 - DNA, 16 bp, Artificial sequence
  Synthetic oligonucleotide
tacagagaatcacccc

SEQ ID NO: 2011 - DNA, 16 bp, Artificial sequence
  Synthetic oligonucleotide
gtccaagtaaggtgct

SEQ ID NO: 2012 - DNA, 16 bp, Artificial sequence
  Synthetic oligonucleotide
gaccttgcaggcttcc

SEQ ID NO: 2013 - DNA, 16 bp, Artificial sequence
  Synthetic oligonucleotide
gggcaaaggatcctct

SEQ ID NO: 2014 - DNA, 16 bp, Artificial sequence
  Synthetic oligonucleotide
cccattctgctatccc

SEQ ID NO: 2015 - DNA, 16 bp, Artificial sequence
  Synthetic oligonucleotide
gctgactaggagggct

SEQ ID NO: 2016 - DNA, 16 bp, Artificial sequence
  Synthetic oligonucleotide
cctgtgaggtagtacc

SEQ ID NO: 2017 - DNA, 16 bp, Artificial sequence
  Synthetic oligonucleotide
gtccccctccagtcta

SEQ ID NO: 2018 - DNA, 16 bp, Artificial sequence
  Synthetic oligonucleotide
gaggactcaattcctc

SEQ ID NO: 2019 - DNA, 16 bp, Artificial sequence
  Synthetic oligonucleotide
gacaaggtccttttgg

SEQ ID NO: 2020 - DNA, 16 bp, Artificial sequence
  Synthetic oligonucleotide
gctcttgtgtgcaccc

SEQ ID NO: 2021 - DNA, 16 bp, Artificial sequence
  Synthetic oligonucleotide
tcaccgcctgcaccac

SEQ ID NO: 2022 - DNA, 16 bp, Artificial sequence
  Synthetic oligonucleotide
ggttgcactgtgcaat

SEQ ID NO: 2023 - DNA, 16 bp, Artificial sequence
  Synthetic oligonucleotide
ttccacaggcctccat

SEQ ID NO: 2024 - DNA, 16 bp, Artificial sequence
  Synthetic oligonucleotide
gctgagttccatatgc

SEQ ID NO: 2025 - DNA, 16 bp, Artificial sequence
  Synthetic oligonucleotide
gaaccgccacctcagg

SEQ ID NO: 2026 - DNA, 16 bp, Artificial sequence
  Synthetic oligonucleotide
gctcacggttggagac

SEQ ID NO: 2027 - DNA, 16 bp, Artificial sequence
  Synthetic oligonucleotide
tgggctcccatgttca

SEQ ID NO: 2028 - DNA, 16 bp, Artificial sequence
  Synthetic oligonucleotide
tcactctaccaacctc

SEQ ID NO: 2029 - DNA, 16 bp, Artificial sequence
  Synthetic oligonucleotide
tccttgcttacagatg

SEQ ID NO: 2030 - DNA, 16 bp, Artificial sequence
  Synthetic oligonucleotide
tgatgctagcattacc

SEQ ID NO: 2031 - DNA, 16 bp, Artificial sequence
  Synthetic oligonucleotide
tgggtaactggctagt

SEQ ID NO: 2032 - DNA, 16 bp, Artificial sequence
  Synthetic oligonucleotide
aaccattcctcaccaa

SEQ ID NO: 2033 - DNA, 16 bp, Artificial sequence
  Synthetic oligonucleotide
gccctgaacagttgat

SEQ ID NO: 2034 - DNA, 16 bp, Artificial sequence
  Synthetic oligonucleotide
ggctcctatcatacct

SEQ ID NO: 2035 - DNA, 16 bp, Artificial sequence
  Synthetic oligonucleotide
taggtctcacaaccct

SEQ ID NO: 2036 - DNA, 16 bp, Artificial sequence
  Synthetic oligonucleotide
gtgcattagtcttcca

SEQ ID NO: 2037 - DNA, 16 bp, Artificial sequence
  Synthetic oligonucleotide
caaaagccaggttagc

SEQ ID NO: 2038 - DNA, 16 bp, Artificial sequence
  Synthetic oligonucleotide
ctgctgttgactacct

SEQ ID NO: 2039 - DNA, 16 bp, Artificial sequence
  Synthetic oligonucleotide
gtacctgccagctact

SEQ ID NO: 2040 - DNA, 16 bp, Artificial sequence
  Synthetic oligonucleotide
cctacctttgctgttt

SEQ ID NO: 2041 - DNA, 16 bp, Artificial sequence
  Synthetic oligonucleotide
agtcaccagcctaagc

SEQ ID NO: 2042 - DNA, 16 bp, Artificial sequence
  Synthetic oligonucleotide
aggcaacctgggagtg

SEQ ID NO: 2043 - DNA, 16 bp, Artificial sequence
  Synthetic oligonucleotide
tggccttcacaatggc

SEQ ID NO: 2044 - DNA, 16 bp, Artificial sequence
  Synthetic oligonucleotide
ggtgaagtgggttgga

SEQ ID NO: 2045 - DNA, 16 bp, Artificial sequence
  Synthetic oligonucleotide
gctggttgtctgctgc

SEQ ID NO: 2046 - DNA, 16 bp, Artificial sequence
  Synthetic oligonucleotide
agtttgtgacccctgc

SEQ ID NO: 2047 - DNA, 16 bp, Artificial sequence
  Synthetic oligonucleotide
ccactcagtgtgaatg

SEQ ID NO: 2048 - DNA, 16 bp, Artificial sequence
  Synthetic oligonucleotide
ctggcctcagggcaat

SEQ ID NO: 2049 - DNA, 16 bp, Artificial sequence
  Synthetic oligonucleotide
gtagacttgggtaggt

SEQ ID NO: 2050 - DNA, 16 bp, Artificial sequence
  Synthetic oligonucleotide
tggtgctaagctctcc

SEQ ID NO: 2051 - DNA, 16 bp, Artificial sequence
  Synthetic oligonucleotide
catgctcaagctggaa

SEQ ID NO: 2052 - DNA, 16 bp, Artificial sequence
  Synthetic oligonucleotide
aaggtcaacagcagct

SEQ ID NO: 2053 - DNA, 16 bp, Artificial sequence
  Synthetic oligonucleotide
caaggtcaacagcagc

SEQ ID NO: 2054 - DNA, 16 bp, Artificial sequence
  Synthetic oligonucleotide
ccaaggtcaacagcag

SEQ ID NO: 2055 - DNA, 16 bp, Artificial sequence
  Synthetic oligonucleotide
gccaaggtcaacagca

SEQ ID NO: 2056 - DNA, 16 bp, Artificial sequence
  Synthetic oligonucleotide
tctcacacgcacttca

SEQ ID NO: 2057 - DNA, 16 bp, Artificial sequence
  Synthetic oligonucleotide
atctcacacgcacttc

SEQ ID NO: 2058 - DNA, 16 bp, Artificial sequence
  Synthetic oligonucleotide
gatctcacacgcactt

SEQ ID NO: 2059 - DNA, 16 bp, Artificial sequence
  Synthetic oligonucleotide
ctttcatgaatcaagc

SEQ ID NO: 2060 - DNA, 16 bp, Artificial sequence
  Synthetic oligonucleotide
tctttcatgaatcaag

SEQ ID NO: 2061 - DNA, 16 bp, Artificial sequence
  Synthetic oligonucleotide
gtctttcatgaatcaa

SEQ ID NO: 2062 - DNA, 16 bp, Artificial sequence
  Synthetic oligonucleotide
ggtctttcatgaatca

SEQ ID NO: 2063 - DNA, 16 bp, Artificial sequence
  Synthetic oligonucleotide
atggtctttcatgaat

SEQ ID NO: 2064 - DNA, 16 bp, Artificial sequence
  Synthetic oligonucleotide
gatggtctttcatgaa

SEQ ID NO: 2065 - DNA, 16 bp, Artificial sequence
  Synthetic oligonucleotide
tgatggtctttcatga

SEQ ID NO: 2066 - DNA, 16 bp, Artificial sequence
  Synthetic oligonucleotide
tatatcaatattctcc

SEQ ID NO: 2067 - DNA, 16 bp, Artificial sequence
  Synthetic oligonucleotide
ttatatcaatattctc

SEQ ID NO: 2068 - DNA, 16 bp, Artificial sequence
  Synthetic oligonucleotide
gttatatcaatattct

SEQ ID NO: 2069 - DNA, 16 bp, Artificial sequence
  Synthetic oligonucleotide
tttctttagcaatagt

SEQ ID NO: 2070 - DNA, 16 bp, Artificial sequence
  Synthetic oligonucleotide
ctttctttagcaatag

SEQ ID NO: 2071 - DNA, 16 bp, Artificial sequence
  Synthetic oligonucleotide
gctttctttagcaata

SEQ ID NO: 2072 - DNA, 16 bp, Artificial sequence
  Synthetic oligonucleotide
ctccattagggttctg

SEQ ID NO: 2073 - DNA, 16 bp, Artificial sequence
  Synthetic oligonucleotide
tctccattagggttct

SEQ ID NO: 2074 - DNA, 16 bp, Artificial sequence
  Synthetic oligonucleotide
ttctccattagggttc

SEQ ID NO: 2075 - DNA, 16 bp, Artificial sequence
  Synthetic oligonucleotide
gttctccattagggtt

SEQ ID NO: 2076 - DNA, 16 bp, Artificial sequence
  Synthetic oligonucleotide
aggttggcagacagac

SEQ ID NO: 2077 - DNA, 16 bp, Artificial sequence
  Synthetic oligonucleotide
caggttggcagacaga

SEQ ID NO: 2078 - DNA, 16 bp, Artificial sequence
  Synthetic oligonucleotide
gcaggttggcagacag

SEQ ID NO: 2079 - DNA, 16 bp, Artificial sequence
  Synthetic oligonucleotide
cttcttgtgagctggc

SEQ ID NO: 2080 - DNA, 16 bp, Artificial sequence
  Synthetic oligonucleotide
tcttcttgtgagctgg

SEQ ID NO: 2081 - DNA, 16 bp, Artificial sequence
  Synthetic oligonucleotide
gtcttcttgtgagctg

SEQ ID NO: 2082 - DNA, 16 bp, Artificial sequence
  Synthetic oligonucleotide
agtcttcttgtgagct

SEQ ID NO: 2083 - DNA, 16 bp, Artificial sequence
  Synthetic oligonucleotide
tcttccactcacatcc

SEQ ID NO: 2084 - DNA, 16 bp, Artificial sequence
  Synthetic oligonucleotide
ctcttccactcacatc

SEQ ID NO: 2085 - DNA, 16 bp, Artificial sequence
  Synthetic oligonucleotide
tctcttccactcacat

SEQ ID NO: 2086 - DNA, 16 bp, Artificial sequence
  Synthetic oligonucleotide
gtctcttccactcaca

SEQ ID NO: 2087 - DNA, 16 bp, Artificial sequence
  Synthetic oligonucleotide
atagattttgacttcc

SEQ ID NO: 2088 - DNA, 16 bp, Artificial sequence
  Synthetic oligonucleotide
catagattttgacttc

SEQ ID NO: 2089 - DNA, 16 bp, Artificial sequence
  Synthetic oligonucleotide
gcatagattttgactt

SEQ ID NO: 2090 - DNA, 16 bp, Artificial sequence
  Synthetic oligonucleotide
aaatgtcaacagtgca

SEQ ID NO: 2091 - DNA, 16 bp, Artificial sequence
  Synthetic oligonucleotide
catgactatgttctgg

SEQ ID NO: 2092 - DNA, 16 bp, Artificial sequence
  Synthetic oligonucleotide
acatgactatgttctg

SEQ ID NO: 2093 - DNA, 16 bp, Artificial sequence
  Synthetic oligonucleotide
cacatgactatgttct

SEQ ID NO: 2094 - DNA, 16 bp, Artificial sequence
  Synthetic oligonucleotide
gaattctgagctctgg

SEQ ID NO: 2095 - DNA, 16 bp, Artificial sequence
  Synthetic oligonucleotide
tgaattctgagctctg

SEQ ID NO: 2096 - DNA, 16 bp, Artificial sequence
  Synthetic oligonucleotide
ctgaattctgagctct

SEQ ID NO: 2097 - DNA, 16 bp, Artificial sequence
  Synthetic oligonucleotide
cctgaattctgagctc

SEQ ID NO: 2098 - DNA, 16 bp, Artificial sequence
  Synthetic oligonucleotide
gcctgaattctgagct

SEQ ID NO: 2099 - DNA, 16 bp, Artificial sequence
  Synthetic oligonucleotide
agcctgaattctgagc

SEQ ID NO: 2100 - DNA, 16 bp, Artificial sequence
  Synthetic oligonucleotide
atattgtaattcttgg

SEQ ID NO: 2101 - DNA, 16 bp, Artificial sequence
  Synthetic oligonucleotide
gatattgtaattcttg

SEQ ID NO: 2102 - DNA, 16 bp, Artificial sequence
  Synthetic oligonucleotide
tgatattgtaattctt

SEQ ID NO: 2103 - DNA, 16 bp, Artificial sequence
  Synthetic oligonucleotide
ctgatattgtaattct

SEQ ID NO: 2104 - DNA, 16 bp, Artificial sequence
  Synthetic oligonucleotide
cctgatattgtaattc

SEQ ID NO: 2105 - DNA, 16 bp, Artificial sequence
  Synthetic oligonucleotide
gcctgatattgtaatt

SEQ ID NO: 2106 - DNA, 16 bp, Artificial sequence
  Synthetic oligonucleotide
tgcctgatattgtaat

SEQ ID NO: 2107 - DNA, 16 bp, Artificial sequence
  Synthetic oligonucleotide
attatgtgctttgcct

SEQ ID NO: 2108 - DNA, 16 bp, Artificial sequence
  Synthetic oligonucleotide
aattatgtgctttgcc

SEQ ID NO: 2109 - DNA, 16 bp, Artificial sequence
  Synthetic oligonucleotide
caattatgtgctttgc

SEQ ID NO: 2110 - DNA, 16 bp, Artificial sequence
  Synthetic oligonucleotide
tcaattatgtgctttg

SEQ ID NO: 2111 - DNA, 16 bp, Artificial sequence
  Synthetic oligonucleotide
gtcaattatgtgcttt

SEQ ID NO: 2112 - DNA, 16 bp, Artificial sequence
  Synthetic oligonucleotide
gccatcaccaaacacc

SEQ ID NO: 2113 - DNA, 16 bp, Artificial sequence
  Synthetic oligonucleotide
tgccatcaccaaacac

SEQ ID NO: 2114 - DNA, 16 bp, Artificial sequence
  Synthetic oligonucleotide
ttgccatcaccaaaca

SEQ ID NO: 2115 - DNA, 16 bp, Artificial sequence
  Synthetic oligonucleotide
tggtgactctgcctga

SEQ ID NO: 2116 - DNA, 16 bp, Artificial sequence
  Synthetic oligonucleotide
ctggtgactctgcctg

SEQ ID NO: 2117 - DNA, 16 bp, Artificial sequence
  Synthetic oligonucleotide
gctggtgactctgcct

SEQ ID NO: 2118 - DNA, 16 bp, Artificial sequence
  Synthetic oligonucleotide
tgctggtgactctgcc

SEQ ID NO: 2119 - DNA, 16 bp, Artificial sequence
  Synthetic oligonucleotide
ctgctggtgactctgc

SEQ ID NO: 2120 - DNA, 16 bp, Artificial sequence
  Synthetic oligonucleotide
agtagtcaatattatt

SEQ ID NO: 2121 - DNA, 16 bp, Artificial sequence
  Synthetic oligonucleotide
cagtagtcaatattat

SEQ ID NO: 2122 - DNA, 16 bp, Artificial sequence
  Synthetic oligonucleotide
ccagtagtcaatatta

SEQ ID NO: 2123 - DNA, 16 bp, Artificial sequence
  Synthetic oligonucleotide
cctttgggtgaatagc

SEQ ID NO: 2124 - DNA, 16 bp, Artificial sequence
  Synthetic oligonucleotide
acctttgggtgaatag

SEQ ID NO: 2125 - DNA, 16 bp, Artificial sequence
  Synthetic oligonucleotide
cacctttgggtgaata

SEQ ID NO: 2126 - DNA, 16 bp, Artificial sequence
  Synthetic oligonucleotide
caacttgaggacaata

SEQ ID NO: 2127 - DNA, 16 bp, Artificial sequence
  Synthetic oligonucleotide
ctcaacttgaggacaa

SEQ ID NO: 2128 - DNA, 16 bp, Artificial sequence
  Synthetic oligonucleotide
caggaagaaaggaacc

SEQ ID NO: 2129 - DNA, 16 bp, Artificial sequence
  Synthetic oligonucleotide
ccaggaagaaaggaac

SEQ ID NO: 2130 - DNA, 16 bp, Artificial sequence
  Synthetic oligonucleotide
accaggaagaaaggaa

SEQ ID NO: 2131 - DNA, 16 bp, Artificial sequence
  Synthetic oligonucleotide
tgcagtcatgtacaca

SEQ ID NO: 2132 - DNA, 16 bp, Artificial sequence
  Synthetic oligonucleotide
ctgcagtcatgtacac

SEQ ID NO: 2133 - DNA, 16 bp, Artificial sequence
  Synthetic oligonucleotide
tctgcagtcatgtaca

SEQ ID NO: 2134 - DNA, 16 bp, Artificial sequence
  Synthetic oligonucleotide
tggtttgtcaatcctt

SEQ ID NO: 2135 - DNA, 16 bp, Artificial sequence
  Synthetic oligonucleotide
cttggtttgtcaatcc

SEQ ID NO: 2136 - DNA, 16 bp, Artificial sequence
  Synthetic oligonucleotide
gctacaatgcacagga

SEQ ID NO: 2137 - DNA, 16 bp, Artificial sequence
  Synthetic oligonucleotide
tgctacaatgcacagg

SEQ ID NO: 2138 - DNA, 16 bp, Artificial sequence
  Synthetic oligonucleotide
gatatttattgctgta

SEQ ID NO: 2139 - DNA, 16 bp, Artificial sequence
  Synthetic oligonucleotide
tgatatttattgctgt

SEQ ID NO: 2140 - DNA, 16 bp, Artificial sequence
  Synthetic oligonucleotide
ctgatatttattgctg

SEQ ID NO: 2141 - DNA, 16 bp, Artificial sequence
  Synthetic oligonucleotide
agggtctttacaaagt

SEQ ID NO: 2142 - DNA, 16 bp, Artificial sequence
  Synthetic oligonucleotide
cagggtctttacaaag

SEQ ID NO: 2143 - DNA, 16 bp, Artificial sequence
  Synthetic oligonucleotide
ccagggtctttacaaa

SEQ ID NO: 2144 - DNA, 16 bp, Artificial sequence
  Synthetic oligonucleotide
ttctgcagtatcctag

SEQ ID NO: 2145 - DNA, 16 bp, Artificial sequence
  Synthetic oligonucleotide
tttctgcagtatccta

SEQ ID NO: 2146 - DNA, 16 bp, Artificial sequence
  Synthetic oligonucleotide
gtttctgcagtatcct

SEQ ID NO: 2147 - DNA, 16 bp, Artificial sequence
  Synthetic oligonucleotide
agtttctgcagtatcc

SEQ ID NO: 2148 - DNA, 16 bp, Artificial sequence
  Synthetic oligonucleotide
cagtttctgcagtatc

SEQ ID NO: 2149 - DNA, 16 bp, Artificial sequence
  Synthetic oligonucleotide
caaattccagtcctag

SEQ ID NO: 2150 - DNA, 16 bp, Artificial sequence
  Synthetic oligonucleotide
ccaaattccagtccta

SEQ ID NO: 2151 - DNA, 16 bp, Artificial sequence
  Synthetic oligonucleotide
tccaaattccagtcct

SEQ ID NO: 2152 - DNA, 16 bp, Artificial sequence
  Synthetic oligonucleotide
acccatttcatccatt

SEQ ID NO: 2153 - DNA, 16 bp, Artificial sequence
  Synthetic oligonucleotide
aacccatttcatccat

SEQ ID NO: 2154 - DNA, 16 bp, Artificial sequence
  Synthetic oligonucleotide
gaacccatttcatcca

SEQ ID NO: 2155 - DNA, 16 bp, Artificial sequence
  Synthetic oligonucleotide
ggaacccatttcatcc

SEQ ID NO: 2156 - DNA, 16 bp, Artificial sequence
  Synthetic oligonucleotide
aggaacccatttcatc

SEQ ID NO: 2157 - DNA, 16 bp, Artificial sequence
  Synthetic oligonucleotide
gcttcatgtctttcta

SEQ ID NO: 2158 - DNA, 16 bp, Artificial sequence
  Synthetic oligonucleotide
tgcttcatgtctttct

SEQ ID NO: 2159 - DNA, 16 bp, Artificial sequence
  Synthetic oligonucleotide
gtgcttcatgtctttc

SEQ ID NO: 2160 - DNA, 16 bp, Artificial sequence
  Synthetic oligonucleotide
tgagcttagcagtcac

SEQ ID NO: 2161 - DNA, 16 bp, Artificial sequence
  Synthetic oligonucleotide
atgagcttagcagtca

SEQ ID NO: 2162 - DNA, 16 bp, Artificial sequence
  Synthetic oligonucleotide
catgagcttagcagtc

SEQ ID NO: 2163 - DNA, 16 bp, Artificial sequence
  Synthetic oligonucleotide
tacagacatagctcta

SEQ ID NO: 2164 - DNA, 16 bp, Artificial sequence
  Synthetic oligonucleotide
atacagacatagctct

SEQ ID NO: 2165 - DNA, 16 bp, Artificial sequence
  Synthetic oligonucleotide
gatacagacatagctc

SEQ ID NO: 2166 - DNA, 16 bp, Artificial sequence
  Synthetic oligonucleotide
ggatacagacatagct

SEQ ID NO: 2167 - DNA, 16 bp, Artificial sequence
  Synthetic oligonucleotide
tgtggctttaattcac

SEQ ID NO: 2168 - DNA, 16 bp, Artificial sequence
  Synthetic oligonucleotide
atgtggctttaattca

SEQ ID NO: 2169 - DNA, 16 bp, Artificial sequence
  Synthetic oligonucleotide
tatgtggctttaattc

SEQ ID NO: 2170 - DNA, 16 bp, Artificial sequence
  Synthetic oligonucleotide
tgttcagttgcatcac

SEQ ID NO: 2171 - DNA, 16 bp, Artificial sequence
  Synthetic oligonucleotide
gtgttcagttgcatca

SEQ ID NO: 2172 - DNA, 16 bp, Artificial sequence
  Synthetic oligonucleotide
tgtgttcagttgcatc

SEQ ID NO: 2173 - DNA, 16 bp, Artificial sequence
  Synthetic oligonucleotide
catctggatgtgaggc

SEQ ID NO: 2174 - DNA, 16 bp, Artificial sequence
  Synthetic oligonucleotide
acatctggatgtgagg

SEQ ID NO: 2175 - DNA, 16 bp, Artificial sequence
  Synthetic oligonucleotide
cacatctggatgtgag

SEQ ID NO: 2176 - DNA, 16 bp, Artificial sequence
  Synthetic oligonucleotide
tcaggtaatttctgga

SEQ ID NO: 2177 - DNA, 16 bp, Artificial sequence
  Synthetic oligonucleotide
ctcaggtaatttctgg

SEQ ID NO: 2178 - DNA, 16 bp, Artificial sequence
  Synthetic oligonucleotide
tctcaggtaatttctg

SEQ ID NO: 2179 - DNA, 16 bp, Artificial sequence
  Synthetic oligonucleotide
tgcttatttacctggg

SEQ ID NO: 2180 - DNA, 16 bp, Artificial sequence
  Synthetic oligonucleotide
ttgcttatttacctgg

SEQ ID NO: 2181 - DNA, 16 bp, Artificial sequence
  Synthetic oligonucleotide
tttgcttatttacctg

SEQ ID NO: 2182 - DNA, 16 bp, Artificial sequence
  Synthetic oligonucleotide
ttttgcttatttacct

SEQ ID NO: 2183 - DNA, 16 bp, Artificial sequence
  Synthetic oligonucleotide
atgatgttactactac

SEQ ID NO: 2184 - DNA, 16 bp, Artificial sequence
  Synthetic oligonucleotide
aatgatgttactacta

SEQ ID NO: 2185 - DNA, 16 bp, Artificial sequence
  Synthetic oligonucleotide
caatgatgttactact

SEQ ID NO: 2186 - DNA, 16 bp, Artificial sequence
  Synthetic oligonucleotide
cccctagagcaatggt

SEQ ID NO: 2187 - DNA, 16 bp, Artificial sequence
  Synthetic oligonucleotide
ccccctagagcaatgg

SEQ ID NO: 2188 - DNA, 16 bp, Artificial sequence
  Synthetic oligonucleotide
tccccctagagcaatg

SEQ ID NO: 2189 - DNA, 16 bp, Artificial sequence
  Synthetic oligonucleotide
tcaattgcagatgctc

SEQ ID NO: 2190 - DNA, 16 bp, Artificial sequence
  Synthetic oligonucleotide
ctcaattgcagatgct

SEQ ID NO: 2191 - DNA, 16 bp, Artificial sequence
  Synthetic oligonucleotide
gctcaattgcagatgc

SEQ ID NO: 2192 - DNA, 16 bp, Artificial sequence
  Synthetic oligonucleotide
agctcaattgcagatg

SEQ ID NO: 2193 - DNA, 16 bp, Artificial sequence
  Synthetic oligonucleotide
gtatattcagtccaag

SEQ ID NO: 2194 - DNA, 16 bp, Artificial sequence
  Synthetic oligonucleotide
agtatattcagtccaa

SEQ ID NO: 2195 - DNA, 16 bp, Artificial sequence
  Synthetic oligonucleotide
cagtatattcagtcca

SEQ ID NO: 2196 - DNA, 16 bp, Artificial sequence
  Synthetic oligonucleotide
acctccgagcttcgcc

SEQ ID NO: 2197 - DNA, 16 bp, Artificial sequence
  Synthetic oligonucleotide
gtaggacctccgagct

SEQ ID NO: 2198 - DNA, 16 bp, Artificial sequence
  Synthetic oligonucleotide
acctgtaggacctccg

SEQ ID NO: 2199 - DNA, 16 bp, Artificial sequence
  Synthetic oligonucleotide
cagtgccaaggtcaac

SEQ ID NO: 2200 - DNA, 16 bp, Artificial sequence
  Synthetic oligonucleotide
acttgatcctgccagt

SEQ ID NO: 2201 - DNA, 16 bp, Artificial sequence
  Synthetic oligonucleotide
ctcgctcaggtgaacg

SEQ ID NO: 2202 - DNA, 16 bp, Artificial sequence
  Synthetic oligonucleotide
agtctctcgctcaggt

SEQ ID NO: 2203 - DNA, 16 bp, Artificial sequence
  Synthetic oligonucleotide
ccttctggtatagaac

SEQ ID NO: 2204 - DNA, 16 bp, Artificial sequence
  Synthetic oligonucleotide
gctagttagcttgata

SEQ ID NO: 2205 - DNA, 16 bp, Artificial sequence
  Synthetic oligonucleotide
tctggttgcactattt

SEQ ID NO: 2206 - DNA, 16 bp, Artificial sequence
  Synthetic oligonucleotide
ggatctggttgcacta

SEQ ID NO: 2207 - DNA, 16 bp, Artificial sequence
  Synthetic oligonucleotide
ggtggatctggttgca

SEQ ID NO: 2208 - DNA, 16 bp, Artificial sequence
  Synthetic oligonucleotide
gcaatgggtggatctg

SEQ ID NO: 2209 - DNA, 16 bp, Artificial sequence
  Synthetic oligonucleotide
cagttgagggcaatgg

SEQ ID NO: 2210 - DNA, 16 bp, Artificial sequence
  Synthetic oligonucleotide
agtccagttgagggca

SEQ ID NO: 2211 - DNA, 16 bp, Artificial sequence
  Synthetic oligonucleotide
gtaaagtccagttgag

SEQ ID NO: 2212 - DNA, 16 bp, Artificial sequence
  Synthetic oligonucleotide
gttcagtaaagtccag

SEQ ID NO: 2213 - DNA, 16 bp, Artificial sequence
  Synthetic oligonucleotide
ctgcatgaatcccagt

SEQ ID NO: 2214 - DNA, 16 bp, Artificial sequence
  Synthetic oligonucleotide
acatagagcacctcac

SEQ ID NO: 2215 - DNA, 16 bp, Artificial sequence
  Synthetic oligonucleotide
gttacatagagcacct

SEQ ID NO: 2216 - DNA, 16 bp, Artificial sequence
  Synthetic oligonucleotide
agtgttacatagagca

SEQ ID NO: 2217 - DNA, 16 bp, Artificial sequence
  Synthetic oligonucleotide
tccttgaggagatctg

SEQ ID NO: 2218 - DNA, 16 bp, Artificial sequence
  Synthetic oligonucleotide
gctatcatgaatggct

SEQ ID NO: 2219 - DNA, 16 bp, Artificial sequence
  Synthetic oligonucleotide
cgggtttatagctatc

SEQ ID NO: 2220 - DNA, 16 bp, Artificial sequence
  Synthetic oligonucleotide
atccttcacccctagg

SEQ ID NO: 2221 - DNA, 16 bp, Artificial sequence
  Synthetic oligonucleotide
gagtcgccatccttca

SEQ ID NO: 2222 - DNA, 16 bp, Artificial sequence
  Synthetic oligonucleotide
tccagagtcgccatcc

SEQ ID NO: 2223 - DNA, 16 bp, Artificial sequence
  Synthetic oligonucleotide
ggctgagcaacctctg

SEQ ID NO: 2224 - DNA, 16 bp, Artificial sequence
  Synthetic oligonucleotide
ctgtggctgagcaacc

SEQ ID NO: 2225 - DNA, 16 bp, Artificial sequence
  Synthetic oligonucleotide
gataacactgggctgc

SEQ ID NO: 2226 - DNA, 16 bp, Artificial sequence
  Synthetic oligonucleotide
tgcttggataacactg

SEQ ID NO: 2227 - DNA, 16 bp, Artificial sequence
  Synthetic oligonucleotide
ctctgcttggataaca

SEQ ID NO: 2228 - DNA, 16 bp, Artificial sequence
  Synthetic oligonucleotide
gctgaatatgggcagc

SEQ ID NO: 2229 - DNA, 16 bp, Artificial sequence
  Synthetic oligonucleotide
cttggattgcttagct

SEQ ID NO: 2230 - DNA, 16 bp, Artificial sequence
  Synthetic oligonucleotide
cctgggcataaaagtc

SEQ ID NO: 2231 - DNA, 16 bp, Artificial sequence
  Synthetic oligonucleotide
accttgatgtgaggag

SEQ ID NO: 2232 - DNA, 16 bp, Artificial sequence
  Synthetic oligonucleotide
gattcaaccttgatgt

SEQ ID NO: 2233 - DNA, 16 bp, Artificial sequence
  Synthetic oligonucleotide
atgtgtgattcaacct

SEQ ID NO: 2234 - DNA, 16 bp, Artificial sequence
  Synthetic oligonucleotide
tgggacaggcatctca

SEQ ID NO: 2235 - DNA, 16 bp, Artificial sequence
  Synthetic oligonucleotide
tagtctgggacaggca

SEQ ID NO: 2236 - DNA, 16 bp, Artificial sequence
  Synthetic oligonucleotide
ggaggtatagtctggg

SEQ ID NO: 2237 - DNA, 16 bp, Artificial sequence
  Synthetic oligonucleotide
ggactgtactatatga

SEQ ID NO: 2238 - DNA, 16 bp, Artificial sequence
  Synthetic oligonucleotide
tcagttggtctgtgct

SEQ ID NO: 2239 - DNA, 16 bp, Artificial sequence
  Synthetic oligonucleotide
gctaaggcatgatttt

SEQ ID NO: 2240 - DNA, 16 bp, Artificial sequence
  Synthetic oligonucleotide
gccatgcttgaagtct

SEQ ID NO: 2241 - DNA, 16 bp, Artificial sequence
  Synthetic oligonucleotide
atagccatgcttgaag

SEQ ID NO: 2242 - DNA, 16 bp, Artificial sequence
  Synthetic oligonucleotide
acacagtgtgtagtgt

SEQ ID NO: 2243 - DNA, 16 bp, Artificial sequence
  Synthetic oligonucleotide
ctgcagtacacagtgt

SEQ ID NO: 2244 - DNA, 16 bp, Artificial sequence
  Synthetic oligonucleotide
accaactgcagtacac

SEQ ID NO: 2245 - DNA, 16 bp, Artificial sequence
  Synthetic oligonucleotide
tagactgtagttgcta

SEQ ID NO: 2246 - DNA, 16 bp, Artificial sequence
  Synthetic oligonucleotide
accagctttagactgt

SEQ ID NO: 2247 - DNA, 16 bp, Artificial sequence
  Synthetic oligonucleotide
gtaagttgatctgtgc

SEQ ID NO: 2248 - DNA, 16 bp, Artificial sequence
  Synthetic oligonucleotide
tacttcttttggtgcc

SEQ ID NO: 2249 - DNA, 16 bp, Artificial sequence
  Synthetic oligonucleotide
tcttgtaccttattcc

SEQ ID NO: 2250 - DNA, 16 bp, Artificial sequence
  Synthetic oligonucleotide
tggttataggctgtga

SEQ ID NO: 2251 - DNA, 16 bp, Artificial sequence
  Synthetic oligonucleotide
gtctggttataggctg

SEQ ID NO: 2252 - DNA, 16 bp, Artificial sequence
  Synthetic oligonucleotide
atgtgtctggttatag

SEQ ID NO: 2253 - DNA, 16 bp, Artificial sequence
  Synthetic oligonucleotide
gagtatgtgtctggtt

SEQ ID NO: 2254 - DNA, 16 bp, Artificial sequence
  Synthetic oligonucleotide
ggtctgcgataaatgg

SEQ ID NO: 2255 - DNA, 16 bp, Artificial sequence
  Synthetic oligonucleotide
gccagacacaactagt

SEQ ID NO: 2256 - DNA, 16 bp, Artificial sequence
  Synthetic oligonucleotide
accgccactgtagcag

SEQ ID NO: 2257 - DNA, 16 bp, Artificial sequence
  Synthetic oligonucleotide
ccgccaccgccactgt

SEQ ID NO: 2258 - DNA, 16 bp, Artificial sequence
  Synthetic oligonucleotide
gggcctccggcccgcg

SEQ ID NO: 2259 - DNA, 16 bp, Artificial sequence
  Synthetic oligonucleotide
agagcgcgggttcgcg

SEQ ID NO: 2260 - DNA, 16 bp, Artificial sequence
  Synthetic oligonucleotide
tactgaccccagttcc

SEQ ID NO: 2261 - DNA, 16 bp, Artificial sequence
  Synthetic oligonucleotide
actctactgaccccag

SEQ ID NO: 2262 - DNA, 16 bp, Artificial sequence
  Synthetic oligonucleotide
gtcactctactgaccc

SEQ ID NO: 2263 - DNA, 16 bp, Artificial sequence
  Synthetic oligonucleotide
ttcatgcggactggtg

SEQ ID NO: 2264 - DNA, 16 bp, Artificial sequence
  Synthetic oligonucleotide
gtgagcatggacccca

SEQ ID NO: 2265 - DNA, 16 bp, Artificial sequence
  Synthetic oligonucleotide
tgatatgtgagcatgg

SEQ ID NO: 2266 - DNA, 16 bp, Artificial sequence
  Synthetic oligonucleotide
aagttggtgagcttct

SEQ ID NO: 2267 - DNA, 16 bp, Artificial sequence
  Synthetic oligonucleotide
ccttcaagttggtgag

SEQ ID NO: 2268 - DNA, 16 bp, Artificial sequence
  Synthetic oligonucleotide
gtaagatccttttgcc

SEQ ID NO: 2269 - DNA, 16 bp, Artificial sequence
  Synthetic oligonucleotide
cagctgtgcaacttgc

SEQ ID NO: 2270 - DNA, 16 bp, Artificial sequence
  Synthetic oligonucleotide
gccttggtaggtaggg

SEQ ID NO: 2271 - DNA, 16 bp, Artificial sequence
  Synthetic oligonucleotide
agagccttggtaggta

SEQ ID NO: 2272 - DNA, 16 bp, Artificial sequence
  Synthetic oligonucleotide
cccgcacaaacgcgca

SEQ ID NO: 2273 - DNA, 16 bp, Artificial sequence
  Synthetic oligonucleotide
gtcttcaaggtcagtt

SEQ ID NO: 2274 - DNA, 16 bp, Artificial sequence
  Synthetic oligonucleotide
gcccagtgaattcagc

SEQ ID NO: 2275 - DNA, 16 bp, Artificial sequence
  Synthetic oligonucleotide
agatgcgcccagtgaa

SEQ ID NO: 2276 - DNA, 16 bp, Artificial sequence
  Synthetic oligonucleotide
gtaagatgcgcccagt

SEQ ID NO: 2277 - DNA, 16 bp, Artificial sequence
  Synthetic oligonucleotide
ccagaaggcacttgta

SEQ ID NO: 2278 - DNA, 16 bp, Artificial sequence
  Synthetic oligonucleotide
ggaagatttgcagaac

SEQ ID NO: 2279 - DNA, 16 bp, Artificial sequence
  Synthetic oligonucleotide
ccttggtcatggaaga

SEQ ID NO: 2280 - DNA, 16 bp, Artificial sequence
  Synthetic oligonucleotide
tgaccttggtcatgga

SEQ ID NO: 2281 - DNA, 16 bp, Artificial sequence
  Synthetic oligonucleotide
gaggtgaccttggtca

SEQ ID NO: 2282 - DNA, 16 bp, Artificial sequence
  Synthetic oligonucleotide
atccaaagaggtgacc

SEQ ID NO: 2283 - DNA, 16 bp, Artificial sequence
  Synthetic oligonucleotide
gccaatccaaagaggt

SEQ ID NO: 2284 - DNA, 16 bp, Artificial sequence
  Synthetic oligonucleotide
ggtctgccaatccaaa

SEQ ID NO: 2285 - DNA, 16 bp, Artificial sequence
  Synthetic oligonucleotide
ccctgggtctgccaat

SEQ ID NO: 2286 - DNA, 16 bp, Artificial sequence
  Synthetic oligonucleotide
gagatctcaacaaggg

SEQ ID NO: 2287 - DNA, 16 bp, Artificial sequence
  Synthetic oligonucleotide
cgcccatcactcttcc

SEQ ID NO: 2288 - DNA, 16 bp, Artificial sequence
  Synthetic oligonucleotide
cacctgtcgcccatca

SEQ ID NO: 2289 - DNA, 16 bp, Artificial sequence
  Synthetic oligonucleotide
catcacctgtcgccca

SEQ ID NO: 2290 - DNA, 16 bp, Artificial sequence
  Synthetic oligonucleotide
caccatcacctgtcgc

SEQ ID NO: 2291 - DNA, 16 bp, Artificial sequence
  Synthetic oligonucleotide
aatagttgtcaccatc

SEQ ID NO: 2292 - DNA, 16 bp, Artificial sequence
  Synthetic oligonucleotide
gccacctttcatgaga

SEQ ID NO: 2293 - DNA, 16 bp, Artificial sequence
  Synthetic oligonucleotide
ctcttggaagtaggta

SEQ ID NO: 2294 - DNA, 16 bp, Artificial sequence
  Synthetic oligonucleotide
gttctcttggaagtag

SEQ ID NO: 2295 - DNA, 16 bp, Artificial sequence
  Synthetic oligonucleotide
taaacaggttggtctg

SEQ ID NO: 2296 - DNA, 20 bp, Artificial sequence
  Synthetic oligonucleotide
agcttcttgtccagctttat

SEQ ID NO: 2297 - DNA, 21 bp, Artificial sequence
  Synthetic oligonucleotide
agcttcttgtccagctttata

SEQ ID NO: 2298 - DNA, 14 bp, Artificial sequence
  Synthetic oligonucleotide
tcagtcatgacttc

SEQ ID NO: 2299 - DNA, 15 bp, Artificial sequence
  Synthetic oligonucleotide
tcagtcatgacttca

SEQ ID NO: 2300 - DNA, 20 bp, Artificial sequence
  Synthetic oligonucleotide
gctgattagagagaggtccc

SEQ ID NO: 2301 - DNA, 20 bp, Artificial sequence
  Synthetic oligonucleotide
tcccatttcaggagacctgg

SEQ ID NO: 2302 - DNA, 15 bp, Artificial sequence
  Synthetic oligonucleotide
atcagtcatgacttc

SEQ ID NO: 2303 - DNA, 20 bp, Artificial sequence
  Synthetic oligonucleotide
cggtgcaaggcttaggaatt

SEQ ID NO: 2304 - DNA, 20 bp, Artificial sequence
  Synthetic oligonucleotide
gcttcagtcatgacttcctt

SEQ ID NO: 2305 - DNA, 21 bp, Artificial sequence
  Synthetic oligonucleotide
gcttcagtcatgacttcctta

SEQ ID NO: 2306 - DNA, 21 bp, Artificial sequence
  Synthetic oligonucleotide
agcttcagtcatgacttcctt

SEQ ID NO: 2307 - DNA, 20 bp, Artificial sequence
  Synthetic oligonucleotide
tggtaatccactttcagagg

SEQ ID NO: 2308 - DNA, 21 bp, Artificial sequence
  Synthetic oligonucleotide
tggtaatccactttcagagga

SEQ ID NO: 2309 - DNA, 21 bp, Artificial sequence
  Synthetic oligonucleotide
tgcttcagtcatgacttcctt

SEQ ID NO: 2310 - DNA, 20 bp, Artificial sequence
  Synthetic oligonucleotide
cactgatttttgcccaggat

SEQ ID NO: 2311 - DNA, 21 bp, Artificial sequence
  Synthetic oligonucleotide
cactgatttttcgggaggata

SEQ ID NO: 2312 - DNA, 21 bp, Artificial sequence
  Synthetic oligonucleotide
aagcttcttgtccagctttat

SEQ ID NO: 2313 - DNA, 20 bp, Artificial sequence
  Synthetic oligonucleotide
acccaattcagaaggaagga

SEQ ID NO: 2314 - DNA, 21 bp, Artificial sequence
  Synthetic oligonucleotide
acccaattcagaaggaaggaa

SEQ ID NO: 2315 - DNA, 21 bp, Artificial sequence
  Synthetic oligonucleotide
aacccaattcagaaggaagga

SEQ ID NO: 2316 - DNA, 21 bp, Artificial sequence
  Synthetic oligonucleotide
atggtaatccactttcagagg

SEQ ID NO: 2317 - DNA, 20 bp, Artificial sequence
  Synthetic oligonucleotide
tcttggttacatgaaatccc

SEQ ID NO: 2318 - DNA, 21 bp, Artificial sequence
  Synthetic oligonucleotide
tcttggttacatgaaatccca

SEQ ID NO: 2319 - DNA, 20 bp, Artificial sequence
  Synthetic oligonucleotide
attcactttcataatgctgg

SEQ ID NO: 2320 - DNA, 21 bp, Artificial sequence
  Synthetic oligonucleotide
attcactttcataatgctgga

SEQ ID NO: 2321 - DNA, 20 bp, Artificial sequence
  Synthetic oligonucleotide
tgctccgttggtgcttgttc

SEQ ID NO: 2322 - DNA, 21 bp, Artificial sequence
  Synthetic oligonucleotide
atcttggttacatgaaatccc

SEQ ID NO: 2323 - DNA, 20 bp, Artificial sequence
  Synthetic oligonucleotide
atgcatggtgatgcttctga

SEQ ID NO: 2324 - DNA, 20 bp, Artificial sequence
  Synthetic oligonucleotide
cagctttattagggacagca

SEQ ID NO: 2325 - DNA, 21 bp, Artificial sequence
  Synthetic oligonucleotide
cagctttattagggacagcaa

SEQ ID NO: 2326 - DNA, 16 bp, Artificial sequence
  Synthetic oligonucleotide
ttcagtcatgacttcc

SEQ ID NO: 2327 - DNA, 20 bp, Artificial sequence
  Synthetic oligonucleotide
  misc_feature (1)..(5): Bases at these positions are RNA
  misc_feature (16)..(20): Bases at these positions are RNA
gcuucagtcatgactuccuu

SEQ ID NO: 2328 - DNA, 21 bp, Artificial sequence
  Synthetic oligonucleotide
tgctccgttggtgcttgttca

SEQ ID NO: 2329 - DNA, 24 bp, Artificial sequence
  Primer
cgagttcagtgaggtgctctatgt

SEQ ID NO: 2330 - DNA, 26 bp, Artificial sequence
  Primer
aagagccatggaaagtagaaatcttc

SEQ ID NO: 2331 - DNA, 19 bp, Artificial sequence
  Probe
ttcctcagatgagccaatt

SEQ ID NO: 2332 - DNA, 310001 bp, Macaca mulatta
  misc_feature (17323)..(17436): n is a, c, g, or t
  misc_feature (25984)..(26003): n is a, c, g, or t
  misc_feature (107240)..(107259): n is a, c, g, or t
  misc_feature (113595)..(113619): n is a, c, g, or t
  misc_feature (136036)..(136328): n is a, c, g, or t
  misc_feature (140788)..(140807): n is a, c, g, or t
  misc_feature (192868)..(193398): n is a, c, g, or t
  misc_feature (210347)..(210366): n is a, c, g, or t
  misc_feature (218041)..(218671): n is a, c, g, or t
  misc_feature (243838)..(243998): n is a, c, g, or t
  misc_feature (291980)..(292210): n is a, c, g, or t
  misc_feature (293097)..(293542): n is a, c, g, or t
tgtgattggcgtatgtttaaggagaaagaaccagagttcagatgtggacatgtcaagtttcagaggtctgttagacatccaaatggagatatccagttgctagcctggagctctgtggagagatctgggtttgagttataaatccaagagatagaagttttcaatcaatttgattatttattgggcactctatataaaccctacaaatactgggcactaacctagacattacaggtacagatattaagaatatatagtttctccctcagaaatctcttaattaatgagaaaagcagacatataacaaaaactgcaatatttaataaaagaagatataaaggcctataaaggtgctgatacacagagaattaactaataaattccaccctggggaatagtcaggaagagcttcagagagaaggtaaataattgattggaactttaaggcaaagaaggatttctctgggtggacaaagtaggatcttccaagtagagtggaaaccataagcaaatgcagtttcactcttcaaaaggtaaatgtgctctggaatgccttaacttgtaacaaattaatcaactcaatacctgctacattttccctcacaatttggaatatataaagaggcacatactaccatagaccaatacctggtcataaatgagattgagggacctttattcatgaagcttaaaaataaaggctgcccttcatgtcagttgcaggtttatatctagctctataatattaactgaggtgtctttttctatgttttctgtgcatgatgagtttttaaaaatcaaagacagagcagcaggcagagtagtctagtttcatggcacacagaatggaggatattgctgaacccagatttttaaaaaaggaagtcagttcttctttttttaagtatggccctgagctcatctcagagcataaacaatagaatttagaataccttttatgatgccgtctggcacctcctatactagatcaagattctctagctcagggaagaagggcaaaggatgagaaggcacagagaggatataaacagagattggtagtgccaagctctgaagaaggtccaacttggaaggtcatttcagacaggagtggagtcagcatttgaggactgtctggtctctactcctgccaggactgcactgtcagccagcttggcatgtatggaccaccgagcaggagtttttcttgactgtgccctaatcttttactttcccaagtttctctatatgggtacttccccttttaaaagctccagacacagccaagcacccctattgctctagcaaagtatgaaaccccagaaatcaatggtttggggaagagtcttaggggaaataaaagcttccttattcttagatgggatagaacaagagcagttcaggatcaataaccatcccaccccatgataaaacatgccccttccagaacctttccttttttgttcattctaggtgtctatctggaacagctggggtatttgagccacagctaagcttctgaaagtattctaaggaatagtttttcacttacttgattcctttgaaaataggggtatcttatgtgataactgctatcccagagtctttgatcctctgttcgttctcaagtcttggctaccgtgtactacttcaaagctctgtagatattttattctaaagaaaagaaacttggttcctttaagttgttgttgaaacatttctctctgggtataaacttgggttgtatctgggagctctgtttaaaaaaaaaaaaaaatgtctttagtaagccaaagctgttagaagcttataagtaagtgacattacaattgatggtcagtaaatagtggaaagatcgcatgactaacttctccttcagatctgagacaacctggagctagacttttgtactctctgctcagaaaagcacatagtggctcggggtttgatgtagtacaaaaatgacatgcttatgtacaactttaactttctgcagcactttttacaacttcttgtgaatgaagtaggcagggcttgcatttgacagatgaactatgtccagcgtgaggcagagttaaaaccctttccttggctcaggaacttcaggctggggcctgtgtctgctctccctatatccctgtcctctagcagatacctctctgctaacatgctgagtgtcctcggtaaattactcaatctctctgtctccgtcttctaacctccacaataaagcccctcgtagttttaactatctttttcactgcgccccagtgagcaggagtttggaacttaattgctgatggaaaggcaatatttggatggctaaacacgctttccaagctatcttgctgattttcctctcattcctggagataactcatctttttgtaagtgtttctttgagtctgtggattgctcttaacgctcttgtaggtcctgccttcatttgggaacaggggcaggcggaaagaaaaggaagtgtattgcaactaccaatatcttcctctaggaggagctgcgcagcccagatgagagtgacacgcaccaactccagctcctcgccgggaagacttcatcccagcaactcggaacgcttggccggggcggcactcggtctctccgcagcagttctcgaactggcctccttgaacgtcggtttccccttcgcttctgcagcctggatctgggggacggcgggccaggcccggcgtgaccgctggtgaacggtggccgccttttcccacccctgctctcccatcctcccttcccgttttaccccgccccctctctcctccccaagcctgacagcccacgagctgccaagcagggcgcagccatgggaagaggaggagggctagggagcggcggcggcggcggcggcagcggcagcggcggctgctacagtggcggtggcggcggcggctgctgctgagcccgggcggcggcggggaccccgggctgaggccacgcgggccggaggccccagcaccattggccccagcgcagacgcgaacccgcgctctctctccagaggcgaagctcggaggtactggagtggggctccgggagtctggctttattttcctcctgttgtgccagggggcctgagagtgaaccctgggactctagttgtttatgaaaatgggaggatctgtcttatatatttacatggatgattttttatttcggatgacttggctgtgctcccctcctccttgcgaagaagttgttttctgctggtgggttgttgtaacccaatcgagtgtgtgtgtgtgtgtgtgtgtgtgtgtgtgtgtgtgtgtgtgtgtctggaagttggtggaggcggcagggagttgcgggcgacagacgaaccatcccactctggcgtctgctgtggcccgcgagtagggtgcgtggaggggtttactccggagatagttttgttaaagtcataaaagttttgctagtgtgtttctgtttgccatcatctgcctggctgaggcagagctgccgaggctgctgctgctgcgcggggaaggatctccggcagcgagactggagagattgggaaggtcgagctgtgcgcgtgaacacggcgcgcagagcgcgcagtcttttgcgcgtttgtgcgggctgcagccgcacattggcaccggtggaactggggtcagtagagtgacggccaccagtccgcatgaattggcgtaagtggaaattgtggcgagccgtcctccccgagcctccccgagccgtcctccccgagcctctacaactagtggttgtaaaatcaaccaggcttaaagttttgacagaactgccagaggtgcgggtcaatggggtggccgcgtgtctagggagagggcgctggcggcacagagggtgcgggtcagggtcacccacttgcgagtgcgtggggaagtctatttggggcgaatgctttacatatagccggaggagatgcctgctgagaccgagctgcgggggttctcggtctggcgtggactgtgtgtcctgaatgagtgtaagtgtgcgctgtttgcgcgcgcgcgagtgtgcgcctggggaggcgtgtcggcgcctgagccagtcgggtgtgcagggtggaagaggccacagaggtgccgcctgcctgtttgtgcagccaggagaccttggaagggacagagaaaggtaacgggaggccaaagtgttgggaagtcagagtagtttctgcataggattaagtattaagggctttaaaataactaaacccattgccctgagtgactgaggactggaagtgagcgtttggggagttctcaggagaactgcatgggagggcgtttgggaggtctaagagatgtgtaatatgtgtgagtacagaacttcggagacagacacaggttggagctatgaatttgagattttcagggtgctgctgtccacagtccagggactggctggtttcagaggtgttcaggctccctggtgtgtgtgcctgggaagacactcatcttttctcccagacatgggatattgtggcagctcaggttctgtttcctgagcaactggtgttccaggctggtttccacctgaatcaccctagaagtatcttttttctgatgataaatgttgaaacatttccagaaattaaaatgctggatagaaacaaaattgatgcagcagataggattgttagtgattgggagctctttttccctttgagaaaagcaaagcttcgtgttcccagattagatttcaaggagtcttcagttatttacagcttcccttcagatgggcctttggatggagctggaaggatgtgttttggcctagagacctttggaagacatcatgtgtagcttaaaggggttgtcccatctgtcatcatcttcttccacccttgtaaacttttgttttgcattaatctaaggaaagttggtgagtcaacatttagctttttgttgttgttgttgttggagtaaatatatcacagtgaaattatagttgtggtctcctgaaggccatgcaaaccaacacttaatgggcaaaggtgtgaaatgaaagtctataaatgcaatgacaaagtgacgagatgaatgcattcttttttcaaaatgaacataactgtgctcacaaaaatttattctagccaggattgggcccatgttttttatcattagtttttaaacagcagactccacatcataaaccactttaaaatggatactagaggcctatgctatctctggcgcctgcttaaacagatgtttacagtgcttggtaacctatgggattgtcatgttgagtatcttgttagctcaggacataatgtttatagcataatataataaatggagccacagttgcagcatgcttcttccaagtgcatgaagcaaatcttgcatcagggaaacaaattctgcagttggtccaacttggctagccttctttgggtatctcctggtaagcactgttaatgtaaagataaatgtgagtaacacggtgagaaagtaggacagtaaattgtttagcttagtgaaaaaaagcatggattatgctttttaaatctgctaacctgaagattacacttctcaggttataccactggtaaattgcacaactatgagaatttggtttgcttttaaagaacaatttttaagaagtatgtcaataatgaaaataacatatttcttaatgtgtttacatgtgtccatacaagccaatactttttcttctttaaaaagaaccctataatttctgtggtaatgatttaaatgttatgagcattcaaatcacctaatcaccttttcaatcttcaattgataagaatcgaagtctggtaagactggagtcatccctcagccaattgtgtaaacaagacagtacagaatgtctttctggcaagtaatttttttcaacctgaaacagataatataaataatatgtcccataaaagaattacttaggatgataattactttagaggtaattatctggtgcatgaacctccatctgtgaaaatggtctaatctatctcttcttggaaataatcagttggaaatctccctttttcattgttcagtccattctaggaaagattgatttctagaaagttctgccttatactgaatcaacattttcttccatccacttgcctgtccttcaggagctgaccacaatgaatctagtctcttttccctgtgtttaccatacttgaaaacaaacattatgctccttgctgaatccccttttgcctacttttgtagcagtttttcacccactgtagggttccaccctcctctgccttgaaccatatgcccttgattctacattctcattgtattagtctgttctcatgctgctaataaagacatacgtgagactgtgtaatttataaagaaaaagaggtttaatggactcacagttccacatggctggggaggcctcacaatcatttccgaaggtgaaggaggagcaaaggcatgtcttacatgacagcaggcaagaaagcaagtgctttctataaagggaactgccctttatagaaccatcagatctcattagacttattcactatcatgagaacaacatgggaaaaacccacttccatgatttaattaactcctactgggtcccttccaccacatatgggaattatgggaactacagttgaagatgacatttgggtgaagacaaagccaaaccatatcgttccactcctaccccctcctaaatctcatgttttctcatttcaaaagcaatcatgctttcccaacagtcccccaaagtcttaactcatttcagcattagctcaaaaatccacagtccaaagtctcacctgaaccaaggcaagtctcttccacctatgagccagtaaaatcaaaagcaagttagttactttctaaatacaatggaggtacaggcattgtgtaaatatgcctattccaaatgggagaaattggcccaaacagaggggctataggtgcaagtccaaagtctaatagggcagtcatcaaaccttaaagttccgaaatgatctcctttgacttcatgtctcacatccaggtcacactgatgcaaaatgtgggctcccatgaccttgcacagctccgcctctgtggctttgcaggatacaacttctctcctggctgttttcatagctggcgttgatggtggcttttccaggcacatggtgctagctgttagtggatctaccattctgagggctgggggatggtggccctcttctcatagctctactaggcagtaacccagtggggactctgtgtagaggatccaactccacatttcttttccacattgccctagcaggggttctttatgagggctctgcccctgcagcacaactctgcctggacatccaggcatttccttacatcctctgaaatctaggtggaagttcccaaacctcaattcttgtcttctgtgcacctgcaggaccaacaccacgtggaagctgccaaatcttcaggctttcaccctcttcagtcgtggcctgagctgtaccttggccccttttagacatggctggaggggctgggacacagggcaccaagtccctaggctgcacctaacaggcccagaaaaccatgtttcctctaggcctccggacctgtgatgggaggggctgccataaagacctctgacatgttctggagacattttccctattgtgttggtgaccaacatttggcttctcattacttatgtaaatttctgcagcagtcttgaatttctccccagaaaatgggtttttctttcctatggcatcatcagcctgcaaattttccaaacttttatgctcttttcacctcgtgaatgctttgctgcttagaaatttcttctgccagataccctaattaatctctctcaagtttaaagttccacagatctctagggcgggggcaaaatgcctccagtctctttgctaaagcattaacaagagtcacctttgctccagttcccaacaagttcctcaccttgatctgagaccacatcagcctagactttattgtccatatcactataagcattttggtcaaagccattcaacaaatctctaggaagttccaaactttcccacatcttcctgttttctgagccattcaagtctctagaaagttccaaactttcccacattttcctgtcttcttttgagctctccaaactgttcaaacctctgcctgtaacccagttctaaagttgcttccacattttggggtatctttacagcagcacccagtctaccattaccaatttactgtattagccgattctcatgcttctaataaagacatacccaagactgggtaatttataaagaaaattaggtttaatggactcacagttccacgtggctgggaggcctctcaatcatggcagaaggtgaacgaggaataacgcactctcacgtggcggcagacaataaagcatgtgccagggaactgccctttataaaaccatcagatctcatgagacttaatcactatggcaagaacagcatgggaaaaactcgccctcatgattcaattacctcccactgggttcctcccatgacatatggggattatgggagctaaaattcaagatgagattggggtggggacacagcaaaaccatatcactgaccatccctcctaatgtgtgttttctaaaccgaagatttagaattcgtagttctgaacattctatatctattaagacagtttaatattaatgaaattctttagccatttcattacactcttgattaatttcatacctataaacaaaataacttgttcttttcagattattaatcatccatagtcaaagcatttttataatagcttcaaaacattttttcatgcctgaaggtactataaatttatggaaagtataatactgtgtgggtaaataaaattctatatgcagtgcaaatagagccttaatttctccctatcagggaatatcaaccccaaaataccggaagtagaatgttccaaagataaacaagttgaagctacatgttatagacaggtagggactatgatgtgtttttttcataggcctcattgtgtctgcttccatgaacatgaatcagtactagcaatcaggcatgtattgaagacttgttctgccgaagtcccagagagtatgccatctggccttaaatgaagtgaaagtacatcaaataaagatacttccttgggcaactgggatttaagatgtatatgcaggacatgactaagtcaaccatctactttttctcaggaagtaaatggcttgccaatgccacaggaaagtctaaagcgttcacactccataagcgtgtcccatgtcctgttgtgtgtctggacaggagctggacaaaggccctgttactacttctagcttaccaagtcttagctgccttggaggaagacagcgaatctggcttatccagaggagaggcctgaactgtgaatggggtacctacctggtgtgactgatttctcttttatgtatctgtcttgggcttccagctaaattgtgaattcaccttgcattgtcttcctacacacacacacaaacatttatggtggatgttgaagacaatgtcagtttttcagcaagtctgaatgtgaaacaaatgactatgtttcttggtgcagtggggtgtgaggatgagagacaggaaaccaacctgtgatataaactgacatctgagcctaccaaaagccctttgagagacctttgatcaagacaaagggataatcatagccttgtgcacttagatgaaattgtccatgctattcctgtatgtgtgtgtgtgcgtgtgtgtgtatgtgtgtgtttcttcactttatccccagcattatggtctcaattcatatacatttgcttttttctttattctattctgatataaaggaaagaaataatcaatgattcatttcctttttttaacatttcaaaaatttatttcattattccctacctcccagtcctcaccccccaaaattacaattacgatagacccattggcaagtacttggacatgcaattttcaaaccaaaggtttactttgctataagaaacatctaagttaggatgttataatatgaaataatagcaaattagatgtcaagaaacctgggtcctctccaagctctgcctttaatgggctttgcatttttttgcaaactatttaaccttcctgggcttcatatttcttatatgttaaaaacaaacaagcaaaaaggaggagtaaacaaaatgaccccttagaattctcttcagggttatggtttgaatgcatttaattatcgaatttctctcttcttttaaatgtaagcatcaagaaaatatttgcctattttattctctcatcattaatttttaatcaattaaataaagtagatgaaaattttatcaaaaccatgtttcttgctttcattctaaaacaatgcaactcaccactatctgattcagaaagtctttctgaaatagtgtttttttcttttgttgttgttttttctttgtgctaaagaaaattcattgatgagtaccaagttcttaaaagaaggatggaaaagtcattgttgtttagtctcaacttctttcttcagtgcttcctcctacctcttaaataggcaaataaagccttaggccaggcactaattttgcttagtaatgattcataagaaggtagtgattttgtcagaaattgctgggctgcatgcttttaatcagcgtctaaacttaccttgaaatactccattccaaaatcagcagataatttcttctagagagtctttcaaactctagtgtcaaacagatgtgtttactgttttgattagggcttatttcttttgttgttgataagacttcagccagttttctttagactaatattattatattcccaatgaattatactcttaggttgtgaatttgtttaaagataaatctatctccagctggctggcttccaagtaaaaagggtatcctagggaagaagtgcacttcacagggattcagtacaggtgtagagaattccctgatagagaattggaacacatcaagagtttgcaaattgaaaaggtacttttatgtgcttatccatggtggacaacccgtgtcctagggaagaagcgcatttcacagggattcagcacaggtgtagagaattccctgatagggaactggaacacatcacgattttgcaaactgagcaagtacttttatgtacttatccatggttgacaacctactgtgctagacatttgctgtagtaactccttgattttttcctcagttgtttataaaattaaacagttgaagtagcctattgaaaactcttaaaagaggcctctcttatattcctttagaatacagtatattaaacaagtgataaagtccaaagaaaaatccttattcttttcttgctttaaaaaatgcactttattgtattaagcattatatctatcttttaaaactttgaattgccatatcaatgaaagtagagtgttatcattacaaaacagaatcgcagacagtgcttattgaaagaaaagatgcataattgatgctgtaaatgctcatcttgaatttgatgatggctggtgagaaacctcagtcggacattcaattttgattgccattggtaagaaaggcagcctttgttctttgtcattatgtggcacatgatcctaattcaccctatcagctgcttctctgcacactttcaagctatgtgattgttatactagaaagcatctaaattggccaaactaatgaagactaatctgacaaagcacgtgtgaatgataaattgtgaaaagaccctgaaaatagagcctcttcagtggcttcttcccctaagggtagaagataccagaatccctgggcaagatgaaatagataaaggaacgacatcatttttatacccagcaaatcagaaatattaaagaaagagaagcaagaatgaagaactactactttcatagttcattcttgcagtgtagcaccttatttcccatagagacattggcgaaaccatgttttgcgttgccatagaataggtgttcagtaaatattttccagatggccttaatatgtagtaaaacagagagaaatacggaagcattgacaagaagtttgtggataatttgagggcaaaaggatgtggataggatcaggttcataatgcaaatttgctattattctccttagattaatgatgtcacccaaacttcacgacctgctttccaaggtatatgctgttcacagccttggaaacatttagaagtttttaatacttggagcaagatggatatatgtttcacattttatctaggacttagtaggacttgggagacatatctactttgccagatcttagtatacttattacggagcatgacattttaattctctttgcttttgtcctataaagtttagtgttttatttttctcagtgcatatagggagtgaattatttatataatctgaaaagtactttgaaaactacttgggaagagatgttgaataaataagttgttttttttttttaaattagcctacaggatgtaagtctggccaggctagtggtatttttggtatcattgtgaaaaatcaaaaacagaacatgcatttatcaatccattagtgtgttctcaggaatgtgctagacactagggaatataaaagtagtataaaacatgactcttgactttaggaccaagcattaaagccagaaggcaacactattaatgtaaattcatggtgtgattatggaacagtttatgactgtacaacttaatgaaaagttcattacagactaaaaatactacatttatttagagagaaggaaaatctgttcagattgaaggatttgaagagtggccttcatgggcaacatggctcctgagccaggacttaagatatggtttttttttttttttttttttgataggttagaagggttggagaggtttcatgcaaggggttaggaactgaggaccaggaggcgtatcttgagctcactgggtttactgataacagggagcaggcagagagtaccaggctgtagatttgttttccattggaagctcttcccatttcttattatggttgctgcatgtaggcttatcccttgggtagggctattggaatggccaccctgagcctattgcttattggatagtggtggcttctgtgtgatatttcagcacatttctcttttctgaacattatgtaaattcaatcgtaaaactactttcttaaacaatgttccaagaggcctattaaagatgccaacaatatgacttccattcaagaatacgatcttgaatgggctttacaatggcagagctgacctgagattacctcctgtactcctgctctcaagccatatgctgatgctgactgtcctggtccaatagagccataaggcctcatagaacttgagatcatctaccagtggctttcaaccaagccactgcctttctgctaggtagtgcatagggacattgggaaatacagttattacaagaactggaaagagttgtaggcttttggtgcctaaagtcagaaatgctaaatttctgtggtgccaggggcagtcctatataagaaattattatgccacctcaaatgccagtagatccctattcaaatatttgagtctcatgtcctcactttatttataggtgaggaaatgggaggtcctgagaagtgacacaactttcttctaggattaaacttcacagtgtcagtgacagatttataactcaattcttttaattttctttcaagagctcttgttgcagcaccacagtccctcctattaacatgggctataactatggaatagcatgttgtttatctctgtcatttttatggaaggatgatagttagctgtgttaactatctgaatgggtgcaatgtgcatagagataactggtacttgaccagcagttctttcccctgggaacacacacagattcacctgtaaattagggttggcagatgcctgttgagatgtcagccacagccaaagcttacagataggctgactttctggaaagggcatggagtaggctttggattcacacaaatctgcttgtctgacaggatttgaatacaactcttcttatctttactatctttgtgactctcaaccaattaaactctctgagctttagctgcaaaagaacaggtgatgattcttatttcacaaggaatgagtcaaaacagttcctggcacatattgggcactgcagatatagagaattccctacagtatctttttgagagtaaagacttgaaaccttcacttataaaagatcctcctgataacagttgctatttttttctcctcctttccccaaacaaccaagggctttaatgagtccctgaagtgtttattttgtttaaactgttgagatttccctccttcagaagagtcctgctggccagagatgagtttcttttgactcctctgtcaatgtccctgtattattgtcatatagtaaaaatggaagatttatctagatggttattagcaggttatgaaacttagattttaaagtcaagaataaaagccattcctgggtagagatgtttttcagagagattgctaccttgccagcgatgagagagcctccttaggtgaggtgaatacttttggcaagttaaaggataacacaatataatttatttaagtaagttttttatttgggactaatttcaggtttgcagaaaagttgcaaaaattgtagaggtcctgtatgttcctcacctagtttcctatgttaacatccataatcatgatgtatttgtcaaaactaagaaaccaacattagtacaatgctattaactaaaatccagacttcatcctaactcccccagggcttccactcacatcgttttttctgttccaggattaaatccataagagtgcactgcttttgattttatgattttttaaatactgtgcatatactttttttatttgggccctctcacatgttaaactaactggcctttgtaaccagatagcaaattctataacagaaaatacaatgatgttgaatccagcatcatgctggacacaaagtatgttctctaaactaattaaatttatcacagcaacaagaagaacaaaattttactcagtgtacatatgtgtagctgagtcctcattggtaagctaagaggtactcataagagtgggatgacttggaaaaaatttgattttgaatgtgtgccctgaacattggtgtaaagcaggaccccctaaatcaacattaactgagtctgtacaatgtgcctagcatagtgtgtgcatatcacacttactcctgataactgtaaggcacatagccttgagtaacttagctgaggaaatgagaccaagggaagttaagttacttgcccagggattcacagctagtaacaaaactgagattaacacatgtttttctggcttcagaacctacactcctaatgtggtattcaattactcccacacttctccacttgcttaatccctattcttggtgtcctttttctaggtatacagaatttgaaaactctatattgtcaaactgcagccaacctggatacacggtatatacttttttgtgagctggattaagtttcagccttgaatttgtggattattttcaaaacctacctaacatctgtaaaacatgttattttttaatatgtagatatccacgtaaattgaccacaaagctcttcagaaggtcccataaaccaataattaataaaattttgagacatggctaataacaggcacagaagcatctgcaaagggcaggacattgatattgtataataatttaaagtattttattattgtataatgtgcctgagttttggataattgaccttcatttctcagtctttacatagttactgcttttttaagtgtcacatgagggatgtggaatattcagtgaaacatttgactaatctttatattttgagtggcccaactgaaaattacccttggttgccttggaactctgggaatgatattcaaaagtagaaattcttgcaaattatttgagctttggctctgggaagataaacaacatgaataactaggttaaccagagctgaaatttctctaacctataattctaaattcagaaaagaatgggctttagggttttttgtttatttttgctttgattacaagttgttggaagcctagagttagtatctaataacacaatctatgtaaaacacaaattattggctcagaatgatatctaatttctaagaagatacaagaaggcaatcacgtaaaaacgtgcttttcttcatagaaagaataagctgggattggccaaaaggtaatccctttagagtctaaggtttagagcattgcatatttttaaagaagatatattaccttttagaacatacataagaaaccattttctttgcttatatggctacataaagttgtcatggttttaaactgtgaccttagatcccttatagaagtaattacaggcacaatctgtgaatgaagatttgcaaactatgcttcaccaagcctcagggactattggatgtccagaggacagagccatgttggatgtcttatgggccttcagtcctgcaaagcagtgtgctttcatgttttatacgcagcagttctgagaaaatttaagttgacaaaacagcctctcttcttattatttttatttatttatttattttgagatggagtgttgctctgtcgccagtctggagtgcagtggcatgatcttggctcactgcgacctctgcctcccgggttcaagcgattctcctgcctctgcctcctgagtaggtggagctataggtacaggccaccatgccctgctaatttttgtatttttagtagatacagagtttcaccatgttggccaggatggtctcgatctcttgacctcgtgatctgcctgcctcagcctcccaaagtgctaggattacaggcgtgagccacggcacctggtgcaccagcctatttttattttttaaagacctgagtgcagtggtgcaatcttggctcattgcaacctccacctcctgggctcaagtgatcttcttacctcagcctcccaattagctgggactacaggtgcatgccaccacacccagctaatttttgtgtgtgtgtgtatatatacacacatatatatatatataaatagagacagggtttagccaggttgtccaggctgatcttgaagtcctgagctcaagtgatctgcccacctcagcctgtccgagttctgagattacaggtgtgaggcaccatgccgagccatcctctcttctaataaaaaaaaannnnnnnnnnnnnnnnnnnnnnnnnnnnnnnnnnnnnnnnnnnnnnnnnnnnnnnnnnnnnnnnnnnnnnnnnnnnnnnnnnnnnnnnnnnnnnnnnnnnnnnnnnnnnnnnnnttctaaattcaggcttacttttgtaactgctagattataaactcttagagggcaaagggctttgtattctctacttgtgtacactcggttagtttgcttaagcagttacttctgtgtaagcaacattaatgaagtgcttactatgatcaagggctataccaagtccttttttatattgtttaatcccacacaaaacccatgatcgacctaattctacacttggtgaaactatgatgtagggaggttaaataatttgttcaaggacccacagctggtaagtcgcacagtttattcaaacccagatcttcctaattgcaaatgtgtccaactcccatgcttctaaccactgcctatgtggtagttctttgatattcctccctctaagaagtggagtttaattcccctgctccattgaatgtgggccgaactcaggtgactcatttctgttaagtggagtaaagtggaagtgaaaatgtgtggctttagcgactaggtcattcaaagacattcaaagtggtttctgtcttggttgttctgtctcatacctattgggcatttaatctggggaaaatttaatctggggaaaatttaatctggggaaaactgccatgttttgagctgtttatggagaggctaagatgaaaaggtactgtggatccaacaggcagtttcaaatgaggacctgaggccctcagaccgacagccagtgtgaaactgaagcctcttgaccacagcctccatgagagtaaaagaatcttgaccccctagtgaaccacagcctccatgagagtaagcttcaaaacagagccttaacacctagtggagcctcgagatgactgcagtcttccaccaacagcttgattcatgaaagaccatcagccagagccatccagctaagctgcttctaggcccctactcctagaaaataactgtttgttgttttgactgccaagtgttcagttcctttgttatgcagcaatagataagtaatgcagcctaacactgtccttatcattttttaaaaaagaaattgttttaattttactaaatcacaaattttaaagcattgatacagcaaggagaaactttccagaaaaaaatgctgccaaatttaaatagtaaaatattaatgtccaaaaaacataatagttacaatgacatctaggattgaggattttgtaagtcaaaggtcagccacttaaaaaattcataattttaaaaggaaggatattaataataactgcattattgaacatagatagcattttgaacttttaagaaatcctcatgggaaaactcaggaaatattgtttggtaagttatcactcataatcttaaattgttaggcgcatgtttgcactttccatgattgaaagaggaatgtaaagcaaagttgaattttaacctcttccctagtgattttactcagcttttcaaaggggtcctgaaagctcagaggtcaagtcatttcttggtttgctctgcctgacaaattgcattaactctgttttatagccactttcagtttaataaatgacttggactttgattaatatctttagtgcttaagcccaagaatttgtataagactttgggatatagtactgtaaatttatctaaagatggacactggaaggtagaaggagatatattagtgttggtttgggtacatgtctaggtactgaatttggatcatcataagtccttacagaagatacttgttgatttgtcttttaaaaaaaaagtgaaagtgattttttaatatatttacaaagtgatttaagtgatttaaggaattcattcatgaagtggatatggctagttcttgtttagtattcagaatgactgtaaaatagaaatgctgattttccttgcccagattgtagaacacagatcaaaccctcctagtccttcccttaaatgttttttctccatgcagcttacaccctgaattctcaaaacatttgttatattgaactggactggatagtatatgcctgaccctgattcatgggattatgctgcaagggaatataaagatgaatattgatagcctgagtgtgaaaattcataattactctcatcctcgttcattaattcatttgttcattaactcataaacagactaattgattcaacagatatttattgaacatttacactttgcccagcagagcactggactaggtgctagcacagtataataagcaacccagaaatagcctctgccctgctggatttcatagtctaagatggagaaaggcattaaccaagtgtaatttaaaatcgttttaagtaatgtgaaataaatatatatgagaacctgactcaggttgggatttgatgattagggaaagctttcaaaaaagggatatttgagatctaaataagagggagaagaaagagacaatggctagagaaaaaataggatccaggaagatacttagtacttctgagaactaaaaacagccaagtcagtgtagtcagagttcaaagagggagaaagtacatatctaagaagaagctagaaaagtaagaagggactacgtcttacacaatgatgtaggctgtattttagtttttacttatcttaagagcaatagaagaccattgaagggtttgaagcagggagtgacataatcaggtctgcattttaagttcacctgctctgttatgaagcatgactggaggaggatggaaagagatattcagggagctggattataagtctgttgtaggccagaggtattggtagcttggaccggggtgatgatgctgaagattgaaaggagttaatatatttataatatatttgtgaagtaaagttgactgtacttagtgctgacttagatagtattggtgagggatgtcatggtaaattccaaggtattgggcttcttcaactgaatgggaaacactagagggagagcaggtaaaagttgagggaaagtgagggacagtagttcattttggggatattttgatttcgatgcctttttaagacatcctcaaggagacacagtgcagtcttgagtcttggatcagaggagatacctgaatgtataaatttgtaagacagtggtttatgcacactattgaagccacagaggtaaatcagatgatgtacagagtgcaaatgaagtgagagaagaaagcataagtctgagccatgagaactctaacatttaaaggccaagtggaaaagttgacaagagtgggaattgtgactagggtagatgccagagtggcatctcagaggccaaggaaagagaatcatttaaggtgctgatgaggggtaaagtaagaaggtcctgtaaatgtccccttggattaataaaattgatgttttgaaagactttaaggagagtgagtttgttgtagtgatggggacagaagccagaatgaaatgtcatgggaaatgggtgggaagtcttgaaagagagacaatgaatataggtaattcaagatatgtggtcaagggaaacaaaaaggataaggctttaactagaggaggaaatagagttaaaggaggaggctttttgtttttgttttgttttgttttgttttgtttttgagatggagtctcactttgtcgctcacgctggagtgcagtggcgcgatctcggctgactgcaagctccacctcccaggttcacgccattctcttgcctcagactcccgagtagctgggactacaggtgcctgccaccatacccggttacttttttatatttgtagtagaaacggggtttcaccatgttagccaggatggtcttgatctcctgaccttgtgatctgcccgccttggcctcccaaagtgctgggattacaggcgtgagccactgcgcccggccaggagttcttttttttttttttttttaaagatgggagaattgagcacatttaaacactaatggggaagaccagtggggaggatcaggggtggcctgaagatagacagagggtggataaataatcatataggattcctgagaagatagaagaagttggatccagagcacagcagggggaattagttggccttggagaggagagatgatctctaccctctgttctagaagaaagccaaaggtgatgtgtgcagatgcagaggtgtgtttgatgtggtggaggcaagtcaaaggagtttttgttcgatgccttatacctgctccagaaagcagttgagtcaccaactgagagagggagagagaaaggggctagcatactgggaaagaaaggggatcatttcagatatttgaggaggacagagaaagtttgaatatgaaagggagtaaatgagtaaaatttagtaggatttctagtcattttttgaaagctcagctgaggctgatgatcatgaattcatggtgataccattgttagaattattataaaatatataataatatattatatattcacctccttttggaggtgctcagcagtttactagacagaaaagcagggtcatctaggcttaaaattttgtcagagaggtatgatgaaaagattgcaaaggagattaggatattggcatgggcaagggagcttctagagtgataaaccaggaatctaagcctgctagtgggggacatgtagacaggagaaggagagtataaagatctttgtgaaggctggaggaaatttgtaatcagagtggttgattaaacaagacagaagtatagcagtcagtgatcagcacaggatgctgcaccccagatcaattaaatctgtatctctgcatacagggcccatttcagcttctcaggagatcccagtgctttccttaagggagaatattgatataactgttattaagacttgtgaaaaagatattagcaatgtgaaatcaagacaaaaacacaaacacagaaagaagttagacaaaaaaaaccaacaacacagaaattacacattttctttttcacaaatcaaagtcgaattcatgggccttcctccctggctcattctccctgacattagaagtacaaagggagtaagtaaagtctttatggggaagatggtataattaagcaacaattacctagggaccagatgcttttgaatttgactgatggaaacagaagcgtggtgaatttgttcactacagtctttttggaggggcaacactcttggctcacttggcatgaggtagtttcagtctggctacaaagatttgaatgtgggacttgagtttctaaaaggggactaactggccttctgttagccaggattctcggacttggtggctatatcacggcttatgctgtcttggaatggtcttgggcccagttgaaatttcttgaaattacatatgaagattcattaatgtattacttggaattcagtgacaaggatcatcattgccaggtttcctagttaggaaaacttacctccattccttccagttaaatagaagaccattgtatagttcatttctggttaagtagagtatttatgaaatgtgtagggcttataggcataactattgctaaagaaagcccagtaaagcttgacattccctctgttgcccttgtctgtctttccataaatttaatgtcaagagcattttttgagaagatgatcacaggatgattcaggtagacatggagcaggttgtgaaaacacttgaatgtttcaccaatgcattagggtttccagagaaacagaaccagtaggggtgtgtgtgtgtgtgtgtgtagatttattttaagacattggctcacacaattgtggagactggcaagttcaaaatgtgcaaggtgggccagtaggttggagacccagagaagagctcatgttgcaggtcaagtccaagtctgctgcagaacttccctttgcttggtaggtcagtctttggctctattaaggcattcaactgattggagggcagtttactttactcagagtacatcatttaaaattttaatgtcatctaagaacactctcatagaaacatttaggatattatttctgaggactctgttctgttccattggtctatatctctgttttggtaccagtatcatgctgttttggttactgtagccttgtagtatagtttgaagtcaggtagcgtgatgcctccagctttgttcttttgacttaggattgtcttggagatgcgggctcttttttggttccatatgaactttaaagcagttttttccaattctgtgaagaaactcattgggagcttgatggggatggcattgaatctataaattaccttgggcagtatggccattttcacgatattgattcttcctatccatgagcatggtatgttcttccatttgtttgtgtcctcttttatttcactgagcagcggtttgtagttctccttgaagaggtcctttacatcccttgtaagttggattcctaggtattttattctctttgaagcaattgtgaatggaagttcattcctgatttggctctctgtttgtctgttactggtgtataagaatgcttgtgatttttgcacattaattttgtatcctgagactttgctgaagttgcttatcagcttaaggagattttgggctgagacaatggggttttctaaatatacaatcatgtcatctgcaaacagggacaatttgacttcttcttttcctaactgaatacccttgatttctttctcttgcctaattgccctagccagaacttccaacactgtgttgaataggagtggtgagagagggcatccctgtcttgtgccagttttcaaagggaatttttccagtttttgcccattcagtatgatattggctgtgggtttgtcataaatagctcttattattttgaggtacattccatcaatagcgaatttattgagcgtttttagcatgaagggctgttgaattttgtcaaaagccttttctgcatcaattgagataatcatgtggttcttgtctttggttctgtttatatgctggattatgtttattgatttgcgaatgttgaaccagccttgcatcccagggatgaagcccacttgatcatggtggataagctttttgatgtgttgctgaatccggttttccagtattttattgaggatttttgcatcgatgttcatcagggatattggtctaaaattctctttttttgttgtgtctctgccaggctttggtatcaggatgatgttggcctcataaaatgagttagggaggattccctctttttctattgattggaatagtttcagaaggaatggtaccaactcctccttgtacctctggtagaattcagctgtgaatccatctggtcctggactttttttggttggtaggctattaattattgcctcaatttcagagcctgctattggtctattcagggattcaacttcttcctggtttagtcttagaagagtgtaagtgtccaggaaattatccatttcttctagattttccagtttttttgcgtagaggtgtttatagtattctctgatggtagtttgtatttctgtggggtcggtggtgatatcccctttatcatttttaattgcgtcgatttgattcttctctcttttcttctttattagtcttgctagtggtctgtcaattttgttgatcttttcaaaaaaccaactcctggattcattgattttttggagagttttttgtgtctctatctccttcacttctgctctgatcttagttatttcttgccttctgctagctttcgaatgtgtttgctcttgcttctctagttcttttaattgcgatgttagagtgtcaattttagatctttcctgctttctcttgtgggcatttagtgctataaatttccctctacacactgctttaaatgtgtcccagagattctggtatgttgtatctttgttctcattggtttcaaagaacatctttatttctgccttcatttcgttatgtacccagtagtcattcaggagcaggttgttcagtttccatgtagttgagcggttttgattgagtttcttggtcctgagttctagtttgattgcactgagagacagtttgttataatttctgttcttgtacatttgctgaggagtgctttacttccaattacgtagtcgattttggagtaagtacgatgtggtgctgagaagaatgtatattctgttgatttggggtggagagttctatagatgtctattaggtctgcttgctgcagagatgagttcaattcctggatatccttgttaactttctgtctcgttgatctgtctaatgttgacagtggagtgttgaagtctcccattattattgtgtgggagtctaagtctctttgtaagtctctaaggacttgctttatgaatctgggtgctcctgtattgggtgcatatatatttaggatagttagctcttcctgttgaattgatccctttaccattatgtaatggccttctttgtctcttttgatctttgatggtttaaagtctgttttatcagagactagtattgcaacccccgcttttttttgttctccatttgcttggtaaatcttcctccatccctttattttgagcctatgtatgtctctgcgtgtnnnnnnnnnnnnnnnnnnnntggtaatcttcctccatcccttatttgagcctagtagtctctgcgtggagatggtctcctgatacagcagactgatggtctggactcttatccagtttgccagtctgttctttaaattggagcatttagtccatttacatttaaggttaatattgttatgtgtgaacttgatcctgccattatgatattatctggttattttgctcgttagttgatgcagttccttcctagcctcgatggtctttacattttggcatgtttttgcaatggctggtaccagttgttcctttccatgtttagtgcttccttcagggtctcttgtaaggcaggcctagtggtgacaaaatctctaagcatttgcttatctgtaaaggattttatttctccttcacttatgaaacttagtttggctggatatgaaattctgggttgaaaattcttttctttaagaatgttgaatattggcccccactctcttctggcttggagagtttctgccgagagatctgctgttagtctgatgggcttccctttgtggataacccgacctttctctctggctgcccttaagattttttccttcatttcaactttggtgaatctggcaattatgtgtcttggagttgctcttctcgaggagtatctttgtggcgttctctgtatttcctggatttgaatgttggcctgccctactaggttggggaagttctcctggatgatatcctgaagagtgttttccaacttggttccattttccccctcactttcaggcaccccaatcagacgtagatttggtctttttacataatcccatacttcttgcatgctttgttcatttctttttcttcttttttcttttggtttctcttctcgcttcatttcattcatttcatcctcaatcgcagatactctttcttccagttgatcgagtcggttactgaagcttgtgcatttgtcacgtatttctcgtgtcatggttttcatctctttcatttcgtttatgaccttctctgcattaattactctagtcatcaattcttccacttttttttcaagatttttagtttctttgcgctgggtacataattcctcctttagctctgagaaatttgatggactgaagccttcttctctcatctcgtcaaagtcattctccgtccagctttgatccgttgctggcaatgagctgcgctcctttgccgggggagatgcgctcttattttttgaatttccagcttttctgccctgctttttccccatctttgtggttttatctgcctctggtctttgatgatggtgatgtactgatggggttttggtgtaggtgtccttcctgtttgatagttttccttctaacagtcaggaccctcagctgtaggtctgttggagattgcttgaggtccactccagaccctgtttgcctgggtatcagcagcagaggctgcagaagatagaatatttctgaacagcgagtgtacctgtctgattcttgctttggaagcttcctctcaggggtgtactccaccctgtgaggtgtggggtgtcagactgcccctagtgggggatgtctcccagttaggctactcaggggtcaggggcccacttgagcagggagtctgtcccttctcagatctcaacctccgtgttgggagatccactgctctcttcaaagctgtcaaacagagtcgtttgcgtctgctgaggtttcggctgtgtttgttattgtttactgtgccctgtcctcagaggtggattctacagagacaggcaggtttccttgagctgctgtgagctccacccagttcgagcttcccagcagctttgtttacctacttaagcctcagcaatggcaggcgcccctcccccagcctcgctgctgccttgccggtagatcacagactgctgtgctagcaatgagggaggctccgtgggcgtgggaccctcccggccaggtgtgggatatgatctcctggtgtgcctgtttgcttaaagcgcagtattggggtgggagttacccgattttccaggtgttgtgtgtctcagttcccctggctaggaaaagggattcccttcccccttgcgcttcccaggtgaggcaatgcctcgccctgcttcagctctcactggtcgggctgcagcagctgaccagcaccgatcgtccggcactccccagtgagatgaacccagtacctcagttgaaaatgcagaaatcaccggtcttctgtgtcgctggcgctgggagttggagactggagctgttcctattcggccatcttgctccgcccccccttgttgaggttttttatcataaaagtatgctgaattttgtcaaacgctttttctgtgtctagtgaggtgatcatgtgatttttgtttttaattctgtttgtgtggtatatcacatttattgactcaggtatggtaaacctacatccctggtatgaaaccactacctccctggtatgaaacccacttgatcatgatgtattatcttttttgaaatgctgctggattcagttagctacaactttgttgaggatttttgcaggtatgttcattagggatatttgtctgtacttttagttttttgttatgtcctttcctggtttagatattagggtgatactggcttcatagaatgatttagtgagcatttcctccttttctatctttttgaatagtttcagtattcaatttttctttaaatgtcagatagaattcagctgtgaatccatctgctcttgggctttttttcttggcactttttttttattactctttcagcctcactacttgttatttgtctgttcagagttcctgtttcttcctgatttagtggaggagggttgtaaatttgcaggaatttgtccatctcctctagattttctagtttgtgtgcatataggtgttcataataaccttgaatgatcttttgtatttctgtgatatcggttgcaatatcttgtttcatttcttactgagcttattcagatcttctctcctcttgtttaatttcactaatggtttttcagtcaattttgtttatcttttcaaagaaccagctttttgtttcacttatcgtttgtatttttgttgttattgctgctgctgttgtttctgtttcatttagttcttctcttatttggttatatcttttcttctgctgggtttgggtttttttttttttttttttttcttgtttccctcgtaccttgaggtgtgaccttagattgtctatttgtgctctttcagactttttgatataggcatttaaaactatgaaatttcctcttagcacaacttttgttgtatcccttaggttttgataagttttgtcaccactatcattttgaaagaatttttaatttccatcttgatttcattgttgacccaaagtcattcaggagcagattatttaatttccaggtatttgtatagttttgaaggtttcttttgggattaattttcatttttattccacagttgtctgacaggatacttaatatgattttgattttcttaaattcattgagactcattttgtggccatggtctgtcttggagagtgttccatgtgctgatgaaaagaatgtatattctacatttttaggtagactgttctgtaagtacctgtaaagtcaatttgttccagggcatagtttaagtccattgcttctttgttgactttctgtcttgatgacatgtctagtactgtcaatggagtaccaaaatcccacactattattatgttactgtctatcttgtttcttaggtctagtagtaattgttttattaatttgggagctccagtgttagatgcatatatatttatgattgtgatattttcctgttggactaatccttttatcattatataatgttcctctttgtctttttttttttttttcactgttgttgctttaaagtctgttttgtctgatataagaatagctactcctagactgggcgcagtggctcacacctgtaatcccagcactttgggaggccgagacaggcagatcacaaggtcaggagttctactaaaaatacaaataaattagccaggtgtggtagtgtgcacctgtagtcccaggtactcaagaggctgacgcaggagaatcgcttgaatccaggaggtggaggttgtagtaagcaagattgtgccactgactccaacctgagcaacagagtgagactccttaaaaaaaaaaaaaaaaaaaaagggctactcctgctcacttttagtttccatttgtgtggaatatctttttccacctctttaccttaagtttatgtgagtttttatgtgctatgtgggtctcttgacaacagcagatacttggttgttgcatttctctccattctgtcattctgtatcttttaagtggagcatttaggccatttgctttcaatgttagtattgacatataaggtactgttctattcattatgttagctgttgcctaaatactttttaaaattatgttattgctttataggccctgtgagatttatgctttaagaagcttttgtttgagtgtatttcaaggtttcgtttcaagatttagaactcctttaagcagttcttgtagtgctgatttggtagtggcaaattcccttaacatttgttaggctgaaaaatactttatctctctttcatttctgaagcttcgttttgctggatgcaaaatttttgactgacaattattttgtttaaatatttctcaaggtttctcttgagataacctgatgactgagtgtctaggtgattatctttgcagtgaatttcccaaaagttctttgagcttcctgtatgtggatatcaagatctccagcaaggccagggaagttttccttaatattcccttaaataagtttttctaacttttagattttacttcttcctcaggaacaccatttattcttaggtttgatcatttaatataatcccaaattttgtggaagctttgttcattttttaaaattcttttttctttgtctgattgggttaattcaaaagtcttatctttgagctctgaagttctttcttcgtgttctagtttgttgctgaaactttccactgatttttgtacttccctaagtgtgtctttcatttccagaagttgtgaatgtttttctttatgatatctatttctttggaaaaaaatgcgttcatattctgtattggtttttaaatttatttaattttttttttttgccttttactggtaactccttgagtagcttaataactgacctgctgaattctttgtctggaaattcagagatttcttcttggtttggatccattgttgtggaactacagtagtctttgggggttttatagaaccctgttttgtgatattaccagaattacttttctggcttcttctcatttgggtagactattacttaacattgttcttgtggactgtttttttttttttaaatttcttattttttctttgttaaggatcagactctaatgtttattttagcctaattttagtcttggtgcttgtaggggtgaagactctgtatgagatccttagttatagagtctttatgcactggttttccccagtgctggttttagtagttccattcttgatatgtgggtgaattcactgtctcctgtgaagttggaatggcagggatcccttgacgcttatgtcgtcctctcatggtatacagtttatttactgttcttttatttactgagttgatgattcaggcttcaggacaactggggaggtatccccgggcaggcaccagctgtggctaaggcaagtgggtagatgtaatacccagtgatgagccgaggacacagccttaatgagggtggctggaggagctctcagttaggtgtgctgaaattttatcaaggtgaagagtgggagctacctcacctcccctgccaggtcagaaagaaagctattcacctcacagcctcactcctgtccaagcatttcagctattcagatcagtcaggcacctcttttcatctataggaatgttgttgctccaagtagggaggaattgtgactctgcctctcatgcaggcctgaatctggggtgtgctcttcttgtgggttatactcaccttggagagttccagaaaggctgtctacaggtgtgtccttgctgcattcctgtggaggaagccccagctatgtctgcggtggagtgccagggggaacaaagactccttttccaaggcccttcatggtcacagaggctgcctgcttgttggggtagaggtgcagactttccctactgcacccagcactgcaattgggtctctgctgtgagaaactacccaccagcagaaagatctgaaactcctactattcagattattttgtcccacatagtgattccttgatgtggtgctctcccctttccactagagatgggcttccggagagccagattgcagtgactgttattgttcttctgggtttagccatccaatggagttaccaggctctgggctggtgctggtgaatgtctgcaaagagacccgtgatctgatcagtcttcaggtcttctagccatggataccagcacctgctgtggtgaaggtggcaggggagggatgtagaatctgtgagaatccctgattgtagataggtatagtgtgctgactttctcaaatgctagttatgctagtagtgaagttgtcatgtggacagactcaggacctctggttagccaggatgttgcaggcagtggtattagctgttgtcttctccttcctgggaacaatattattgtcatgagtatggcctgaattggttggcctccagccaggaggtggtgtcttttgtgtttggctgccaaggcagatagaaaaatgccatcaagtggggccaggatgagctgagactcttcttgggctaggcttgtcacagccactatgtaggatggggaggatggttttcaggccgatggggttatgttccagaggggattatgactgcctctgttgcacaaaatagttcaccagggaagtggagaatagccagtagtgaaaagcttcacccagctcccacacagttggtgagcccaatctcactttgcagtgctgtgttaacagcaccaagtttagatccaggcatcctgcttgtggaactcagtcttgctccaggccatatacttccccactgagaaagcaagcaaggctttcaggccacacccctccctgtctgcccataatggcaggagcctggttcctgtgctcatatctgctgcagttcccatccacccaccagattctgttcaagcaggttcacgcccactcaaaattatcacaaaattcagttggaggcttctttcaccttgtaccccctccctaattctgctggctgccttccccgagggcccctgtgatatatagtcaggaatggcttccctgggtttgagctggagactgggagtgcctacaagactctttctgctgctgcttctacttttgtatttcacaaggttccctaaatctgttccagctctaggtaaggttgagtccttctctcatgatttgcattttcagattccccagtgaggaggtgtgtttggaggcaggtttcccccacttacactttgggaactcattgctttttgcctctctcacagtttgcagcagcatgtcacttctttcaacggatctgtgaattctttccattttcttgatatgatcctgtggtggttcttggagaaaaggttcacagtataagtctccacacactgttctgtccatccaagtgggagatgtatgttagccttgtctcctatccgccatctttctgctgtcaaatccttctctttagatagctgacataccatcttttgtttcttctgacttggttctattcactgacattcctctctatcaagtggatttttgaactttcatggaaatttattccctatttatatggaaataattcccaatttatatgaaaagcttacaaagtgattcattaaccaagtatttactgaggtgctaaaattatacactaatgcaagagtggctggcaagtcctttgccttcatggggattacattctcttgtaaatgtcacatgatggccactagatttaggaataaaggactccagcatgaaacactgacacttctgctggagaaatattttacaaaccatatatattgaagcctaaactctggtttattggtaaaggagtagcactgatactagaattttgtgatcaatatgttgggataagaagtcagaagacttagatctgtgttctttttctcctgctggctataggttgttttaatctctgagctgcaatttcctcatctatagaataggttagaccagattagtggtcttcaactttggctgtatattagaatcatcttactcttgaacatttaaattagaaatttcaggccaggtgcagtggttcacgcctgtaatcctagtattttgggaggcagatatgggcggatcatgaggtcatgagatggagaacatcctggccaacatggtgaaaccccatctctactaaaaatacaaaaattagctgggcatggtggtgcacacctgtagtcctagctactcgggaggctgaggcaggagaatcgcttgaacctgggaggcggaggttgcagtgagccgagatcgtgccactgcactgcagcctggtgacagagcaagactccgtctcaaaataaataaataaatgaattaaaattaaaattagaaatttccctgggtgaggaggaaggcagaggtatttttaaagctctcaggtgatacaattctgttttaaggtaggactaaaaatcatgggactacgtcagaagttctaattagaaatctacaggttagttttctccgggcatgtgtatagtgcttaaatgtcttttaaatttgttaccaacatagagaaaaaaaagatttctagtttcccttgaaaaatggaaatattaggcaacagttgggcttatgtttctgagtggtaaaaattaaacaaagtaaacgagtctccatttcatttgttcctgttgccttcctggctcttgaaggcattgtcatttgtgaaaactaaactagatggtctttaaagtctccaattatttgaattgcttatttccacagccagaaaagagatggtaaacaaactatacctttatctataagctagttggtttgtgaaatcaaaagggacttaatctttgaatatggaaaaatcccagcttccagtggaagaggaactccatctcattaatagcaggactccacagactgctatagaatagacacccacctggggctaagagggagggaggcggaagaggacttaattcattttctggggatttttaatgaagctttcccctctttcattatttcttatttgggagcttgatcattagttgggatgtgactggctttccctagggagcaaaaaggagattagcagaggttttgctcgcttcttcctgtgatttactgtgggaagcctcccaggttcttcccttcgcttctctatgaccttcatctttatggtttcttgctgtgtctctctgagagcaagtacctgggtgaaaaaggctgagtgtgtggtttattggcaactgcctggcattggatttaagtgggtatatttgaattactagaattttacgttttataggttcaaaatatgcacttgaattttgtaggacctcttacccaaattgaataatcctttgtgccttgttaaattttaaacagtcacactatcaacattatgacatatggtatatatgatggcaataataaaaataacacttattgtccactttaatgtgctaacagtgttccaagtgatttgcataaatgtcaaatttgttccacacaattatcctatgaactaaatgttattgtttcctggtttataggtgaggaacacagaggctcaaagcagctatttggtttctcttatttcaaaattaggggaagtgagatacattaacctgtataaccagaccttgttaactgtttttggtaaattccaatgtgtattgattttcacaaagacaaagcacaccactgttatattaaatattaattttttcatagtccctcaaggtgcttactggctatattgttactgtcttttgatgttgtttatacatggtggattacagaattccatgaacatgaaaaatcttgactttatcctagcttattacctattcttaccccctgcaaagtaaaaagttcacaatagcattagtaagccaagcaaactacttattagccacatgaacttactagcctctctgcctccgtttccttgttgggaaaatggacaatacctaactcaactcataaggatatttctagaatcaggtgtaatatcaaataaaaatatatttcatttttcctagaagatacccatgtatatcttaggtactgatgcattcatagtgatgcaggacatacaatgtttattcttttccttagcaacaactatccatggagatttttccactttagagatttaattccattaaaggtttttagattgattggacaatgagaatgtttttgtctctctgaaactgaggctgaaagttgatttcattctcacacttgttcccagcaaaggctccttccatgctatcaccatctaactgctgccaggctcttttcagtgtagatggacaacacgatggattaatttctcttgctgaagtcatttctactcttcattgccgaaaggttgcttatttgtgtgctcagcttcttgaataagttggcacattcagtggatctccccttgtatagctcatactcacttgtcagtaaaagatttgttgtgtgcaggaagggagttggggggacaatagctcctgcctgctaagcaatctaaattatgagttgagcctttcattcattgctttatatgtggctgtatgcttgctattaactaatttttgctgtttatgggaaaaatagttgccttttgaaaagaaaaaactgaaaagaggcatccatattcttctcaggtcttagtccatgggtgagtgggtgtgtgcataaacatatctatatacatgtgcatggaaatatacatttatatacatgtggtatatgtgcatacttagtgtaactaatgctatatataattcatgtggcaaattcaataaggacaacagtaacaaaaaggccagggaatgtaatcttctcccctgaatacttcaggtgcccaagaaacttatttgtctttcatattgtggagtaaataaagttttattttaaagcaactttctcagatcttttaaaaaaatgtttttaggtacagggtcttgctctattgcccaggctagagtgcagtggcatgatcatgactcattgcagcctggaactcctgagctcaagtgatcctcctatctcagcctcccaagtagcagggactacaggtgcaagccactgtatctgtctaatttttttcatattttttggacatgggatctggctatgttgcccaggctggccttaaactcttggggtcaaacaatccttctgcttctgcctcccaagtacctgggattacaggcatgagccactcagatccctttgtgtggcacgtataaaaccaatattttaaaactcagagcaatcttttttaatccttggagtaaccttatgaagatagtaaataacaaatgctctgagatctataatctctactactttaaagatttatttaaaattttatgaatttttattttcataattagtattttatatagttatagtaaatggtattttataaatatataaatacattaatgtttttaaaatttattttggagttttatgttggcttcaagataatgttaagtcttttaagggttacttattaatacaattttcagcttttatttgttcaaactcaagtaatgaaaatttctgcttaaaggagaaggttttacttccagcctcttcaggattaacttgaaagaaaatgtcgttaaactaaaaaaactatacatattacaccaccaaatacctgctttctggcactaataaattagttttttgaatgcgtccaccttagtaatgaattatctgcttgcatatacttctgttttaaaggatagataccatttgttacctgtgtttcagtcacagatttttactaaactttgctccctggtataaaacacagaatgggaatttgcagtataattgtgaaaaaactccatttgtttcctatattaagagcctataagcaaggtagagatggttaactgaggaagttgaatgataacatccaagctaagagccagttcaagaatacaatcccattctcaatagccacagacagaataaaatacctaggaatacagctaatcaaggaggggaaagacctctacaacaataattataaaacgttgttcagagaaatcagagatggcacaaaaaaatagaaaaacattccatgctaatggataggaagaatcaatattgtgaaaatagccatactgcccaaagcaatttacagaatcagtgtatgtcaaactaccaatgacattctccacagaggcagacaaaaactgtttaaaaatttatactgaaccaaaggaaagctcaaatagccaaggcaacccaaagcaaaaacaacaaagctggtggcatcattttatctgacttcaaatcatactataaggctacagtaaccaaaacagcatgtcgctggcacaaaaacagacacatagacaaatgaaacagattagagagcccagaaataatgccacacacctacaacaatctgatctttgataaagctgacaaaaacaagaaatggggaaggactctctattcaataaatggggctgggaagctagctagccatatgcaggagattgaagctggacccctccttacaccatataaaaaaatcaacttgagatacattataaacttaaatgtaaaacctaaaactataaaaaaaaccctggaagataacctaggaaatgacattctcgacataggacctggcaaagatttcatgacaaagatgtcaaaagcaattgcaacaaaaacaaaaattgacaaatggaaagtaattaaactaaagagcttctgcacagcaaaagatctatcaacagagtaaacagcctacaggatgtgagaaaatatttgcaaactacacatctgacaaaagtctggtattcagaatccataacaaacttgaacaaatcaacaagcaaaaaacaacccaattaaaaagtgagcaaagaacattagtagacatttttcaaaggaagacatacatgtggccaacaagcagatgaaaaaatgctcagtatcactaatcattatggaaatgcaaatcaaaaccacaatgagataccatctcacaagtcagaatggctattatcaaaaaaaaaatgaaaagcagttgcttgtgaggttgtagagaaaagggaatgcttataaactgctggtgggaatgtaaattgttcagcaattgtgataaacagtttggtagtttctcaaagaactcaaagtagaattaccattagacccaacaatcccattattggacataaactcaaaggaatataaatcattttaccataaagacacatgcatatatattttcattgtggtactatgacagagacacaataacaaagacatagaatcaaactaaatgtccatcaatagtagactggataaagaaaacgtgatacatatataccatggaataccacgcaaccataaaaagaaatgagatcatgtcatttgcagcaacatggatgaagctggaggccattatcgtaagtggactaacacaggaacagaaaaccaaatacaacatgttctcatttataagtggaagctaaacattgagtacatatggaaacaagagaacagcagacactggggcctactcaagggtagagggagggaagagaatgaggattttaaaactacctattagatactatgcttattacctgagtggcaaaataatctgtacaccatacccctctgacatgccatttgcctatataacaaacctgcatagtactcctgaacttaaaagttaaaagaaaaaacgaaagattaatgagtgtgatactggaacaatattatgatgcaggacaattttttgtgtgtttgctagctgggcttgagatttgataagtaagtccgattatcctaatccactagtgatgatgttctaggctttgaaattcaaactactactactccactttgagagagactgcatgagaattggacccagcctggggctttagacaccatagttcaaatcttggctcttatcattttttagtcacgtgttgtgcactgaatgtttgtgtttcccagctccccaaattcataggttgaagccctaacctccaatgtggctgaatttgagattagggcctgtgaggagctggtaaaagttaaatgaagtcttaaggataggtcgccaatcctatagagttggtgctcttacaagaagaggaagagacaccagagtcctctctctttgctatatgaggacatggtgagaagtggccatctgcaagctcagaagagagccctcaccaggaacttaagtgtctggcaccttgatcttggacttcccaacctccagaactgtgagaaataatttttcgttgtttaaatcacccaaactgtagtattttgttatggcagcccaagccaactaatataccatgtaagcaggttacttaaatttactaaatacgtaagttacttaaaatttcccatcctggttctaactttactagctatcacttttactagctaacacattacattttcttcaacttgccacatgctttttttgtgagttttaaatgaaattgtttaagtactttgtttatcatgctgctgacctatagtaggcacttaaagttagtttccaggaagtttggaatggatcttacttatttatgcaaatggttgactctgatggtacttgttcctctctggaaagggttcaactctcattagaatagtcctatgactgcagtaattttgtatgttaaacttatatttttatctgcagaatgttaaatctgcaaacaccatccatcaacccaaaagcaaaaaggagtgtttcctaatagttaatagttggtaggttaataggaaatctagaaaaaaaaagtttaataatgaaggctatattaatacccagtctcatttgagtgcctgtcagtaaggaaatagttatctttcattgttaatcaatgaagaccaattggcataattagggctctggtgtgttttcttcaaatggtcttctaggacctaatttaatatcattcgagaggcttaaagaggatcccatgtttccaaatgtatcttagagtcctcagctgcccaacatcccaccattaatcatgctttgcagatgaaaaattgaaggctccttgtctctgaatatctgggatatgcttttattcctaggatgaacttctccttctttgccaataaggaagaaaaagggactgaggtgatttataagagcagttctagtgagtgaaatatgggtcctagcaaaggaggacacagctgccccttgtaatagtggagggaaggaaggaggcaggctggcagtactttgccctcctcaaccccaaaccctatctgtttaccacagtggaccttttttctgaactctgacctcattatttcattcattatccacataatattcatcaatgttctccaaggcttttagaataaatctttaacgtttctccaaaagtcacaaggtctgacacctgccttccattttccagcttcatatcataatcctcctttttggcagtggccacactgatcatcttccaggtccacaaactcagcatttgctcattgtgaaccccttacatcatgactgtcagcccaattgtcatttccttggggaggccttccctgaaccctgggagtggatcatattcccctatcatgtgctttcatagcaccatgaatgtctccttggtggcagtccccagcaggagaattctgtgtttatctgtatgactgtttcataaatgtttgtcttcctcccaatagtctgtcagcactttgggagccagttgtgttttgctcttgattctacctccagcacaggatgtctcttagtatttatggaaggggacatgaaaaaagaaaaagtccactgcatgaagatttaatccagtgagactgaggcctgaacatctagctttagggaagccagctgctagcaggacagactggtaggcactaggtgaggagaatggaaaaacacagggaaagagcatcattttctttattattttgcctctgacagacccctccaagtaacagattccaaagagattgtgaacattctccctctggtatggagtctcctgtcctgtcagaaatatggtacccagaggccaaagctgctgcataagcaagttgtcatgaaactattccaggacaggtttcagaagtagggtcttaaaaatgagtattaaatctaatgttcacccagatacatttccaacccacatatagacaccgaatttagcaatgaaaatggatgctactctgttaaggatttatttgaaatgttggttttctctcgtccatctgatacagatcatagctctgtttctgtcattagattgattttcatgtttctcaacacagactctcagagataagtttaatttttcagcatggccataggaatgatgaagtcattcctcattaagatgaagttaagcaaaatttaataatacttgtttaggattccttatttacttttctacacaaaaagagttgcaaggggaaaacaaaaactttaggtttgagtaacttccttaattcaaatatagatttaaaccactttgtcataatatgcaaatgaactattgcttttttccccacaggtctgttttcaaatagataatgagattatataaataattaccttatataaacttaaggttactcattattgaaagcaatcttctttttttgtttctggtttattatggtttaagagtgagtctttgttttagatacttgaaaacaaagtgtgtgtgtgcgtgtgcatgtgtatgtgtgtggatatatacatctagggaggtcgtcaaattcaaaaattataatacaatgttgtaatgtcagcacttcctattgcatagttttataatggggatatatagctatgcattaaaatgcattactgaaatggaaaatcaggatgtgttaaaaatgaattagtaattatattaagatctgaatgggaactagcatacaatctaacttaagtttttgaaaaataaaaaaatccagaaaataattaatgataagttagtttcagtattacactgataaatatttcaagaataagctataaaaaatgaggtagatttattattttaaggttcatactaaaagattataatatttatttaactttatttaatttagaataagattactgtcatctctctaagcatttatgtaataatgtattatttacttttccattaaatattactgagataaataaggagtcgtggtgaatgaaatataatttaataagcagggttttcttaggtgaaaactagtcatgtcctgctataaatgtatattgagagagaagctgaatagaccagctccatgatttagtcaatgacatgacttcagggaaaatgtttttatgccttattggccatatcttttaatacttgcattgaaaataaaattacatcccaagattatgagggttgtgaaattttataattagatatttaagtcctaaattgattagcagcagtataaacatagaaatggattttgggttaaatctgagaactattttcttatgctaaaatttgcatgcagatgacaataggaaaatcaaatgttttcctggaaaattttcaaatgggacaaatagtcgtctttctggaaatatgaaataaagggagtggtagtggttggactataaacctttttgaaggccttttaatctttagctgtaattcatgttttatcatcattgaattttaaaaacagaaaataccttagaaataatttagtgttaccctgttgatactaccaaaaaaaaaaaaaaaaaaaaaaaaacagtgctcagagtcacataacttgattcagtcagagctggtgctagatgcttagtcttctgacttctaattcagtttgctttcattatctactacctgctgctgactcagagctcctcagctatctgcaagtggatgtgtttattgagcatttacgatgtacatgtactactctcaatgcgaaggatgtaatggtgaatgggagcttactttctgactcaaatattagttttctctctttgtgttccaaatgaaagtgtccttttgctttatctgaagcaggaagttgtaagtttgcttattttacttttgaaattttagagaattggcagtggggtcatgccatcagaaacacatacatgcaatgcatggatgcactgtgtgaatgagctctctggaaggtggtagattatgggaaagaaggaagctcagaaagagagtgaaccaagtcaagaggaaagagagaagaaacaggcaagtgtggagcagaggaaaagtaggagggtcatgaatccattctgcaggtgtgtgctgagagactggaagaaggaaaagaaccaaggaagtctctgccatgttatcttagttttgttaagggtataaagagattgaagagggtttaactaggccatccttaaccctaggtaatccctagagtccttagcagaactaataatctaaattacgaatgtctgtgtgtgcacacacacagaatgcacttgctaatgtctatcattatgagtatcttctgtcttctccactacaaggaaaggaagggaatgtgaccctctttcctgattagaagtaactagggcatagtaacacaaatggatgaattaaactgtttgaaatggtgcactggaatatatttattttggggtaaatcatgaagaaatgaaaaaggaagagattctcttttgagaaaaagtttgtttcctattgtcaattgagcaactctgtgaacattctaaagataaagaatgattattctgtaaagtgctgggatttctggtgctgtgtgacaaagttcggttccttttgtctaagttagttataataatctttaatgaaaagcagaggggtcccctggtttggaacaagtacctgagtcaagagttgacaagtggaatagctgggcccagaggattctgtcgagttgacaaagccagaacagtacatttggacagaaagtttgattttcttatactgaatgtgatgatcttgaagaacagattttttttttttttgcatgaaaataaatctttattttcagttattacccaccagtaagagaaagttaggttaagggtataaagggattgaagaggtttctacttttgcccggtccttagtttgaatagccttccactcatccaaaatcatctcttttggaccctcctctttcacctcttcaacttcattctctttattttcagtgtctgccactggatgatgttcttcacattcaagtgtttcctcagtcacatttgattgatccaagtcactgcaattacaagatatttgtttctgaatgtatttgggggactctgttaattcatctttgacaattccccaattgtgagatccgctacctccatgttacaggtccttgtgcttcaggccactgtaatgtgaaaaacaagatctatcacttccactatacctatcaaattcatgtttgccgtgagaatcaaatccatctccttgacccattgcacgtccactgccctctcaacctcttccaagaccaccacgacctcaaataggtcagtcaataattggtctatcaactgaaaattcacctccttcaaccttttcttcaagtggcttttcaaatctttgttcacaaggtggtctcctttctggtcttctatcaattattttcccttcaccctgaagttgttgatcaggtcttcttccaacttgtcttattccttcttctttttttcttttttttttctttttcctctaggcaagctttattcttcgattcctctatccaggaagggggctgttggttgcattttacccaaatggaatgtgatgggaattgggagcttgagttgtttggagaaggagttgtcaatcctagcaaatgtctatagctggtgtgtggtgtccatcaattcttgagggcttggccatgcagactagggaatggtcagaacagagtcattcagaggtctccagagctttacaatatcaaggttcagggggtatagacagtaaggaaaaaggccatttcctatttctgtccatttttggtacagtagacagttaaggttttttcttttgactagcttttaaaaaattacttaggaaatggaaagcttataaacattcataagtgaattgttgaattgtaaccccaagtggtttccttacctagtcaccacttaaccagaaatattagaatacacggttcaacctgaattcaaccagggggataacctgcctgttgctcaagcagtcatcagagtttttaaaaacaaaattaagcaaaaaagacctttccccaaatacaatcattactacttagctttgtatgatccattcctaagaaagtcacattccatttcagaaaacatgactgcttaaggttcagttaaagtccttgccttcaggtgcttacttttagttttctttaaattaacttctgaaatgtttatcttatgttttgtgctgcattcctgaaaactgtaacctttaaggacgtaggcctcatctttataaaggaggaagaaaacaacaaggaggtgtctcatttgggaggcggaaggttatgaccaatgctggaagtcttcctcttccttacttgttattcaacaagatgggttctgtggtgtcgcatgaggtatgagttggaaatgaaagctacaccacacttcttacattcatagggcttctccccagtgtgggtgttctggtgcacggtgaggctcaacttctgtctgaaggccttcccacactcattacacgtgtaaggtttttctccattatggattctctgttgaataagtaggtatgagctacatgtgaaggccttcccacattcattacacacaaaaggaagatctccactgtgaattctctggtggacaaaaaggcaagagagctgactgaaggttttcccacattcgctgcagtcataagatttctgtgcagtgtgaattctctggtgcataataaggtgtgaaaaataactaaaggttttcccatactcttttcactcatatggcttctcaccagtatggcttcactgatgtacaataagatttgcactctcggtaaatgctttgccacaatcgttacaggcagagggcttctccccagtgtggatcctctggtggacaatatggtttgagctcccagtaaatattttccaacactcattacatttacagcattttctgtaatgtggactttctggtgccaagcaagttgtgagctataactaaaggtttatagttaaacctttcactgcacttaagggttttttctaaggagtggattttttgatgtatggtcagatttgaactctgagtgaaggctttcccacattttgagcaaatataaggtttctgtccagtgtggattctctgatgcacatcgaggtttgcactgtgaatgaaggccttcccacactcatgacattcaaaaggtttctccccagtgtggattctctgatgcacaatgaggtttgcactctgactaaatcctttcccacatgcactacaatgtaaaagactttcacccaggctgggtttttggatttttaacagtgtcagaattaagggtgtattttcccccagatttcttacatttctgatcttcctcttctttgaaactttcaggtaagtgacagtcattcactatcacttatctgaaatctttcatttcactccttattctctgcctctttaacatgttttctttttcacaagcttgtcttaactcaggtccttaagaatcagctttctggattttccgaatatgatgaggggattttcagcttcctcacatatttcagtttttggaaccagtaactgaaggttcttggtttcagcaccctttcttcctcttctgattcaccagtctgacgaccctcccctgggatctagacttccatgttttcagagtgcacttgttggctgggtacctgacctgggaagttttcttcttcctcctcctcctttttcaccttcaatgggccccgtagggctagggccatggcttctctcaattctgcagtcatctctgcttagcaggggaacgcctatagctgggagctgcccagcagaggtcaaaccccatctaagctttatgtttcaaaagcttcttcttgagtttcttcccagggccaagatgagtactgcctatgtgggcagctgagaggcgcgacctgagttcactggctctgcagcaggaggctgagggaccgggacctcagcgcctactggcacgagaacgatgacccatattccttctttcttaagcgccagaggcggctgcatctcctctttcttgtcaaccgcgccacgctggggtggcaacggattcttgcggtctttctggggctccttgcgcagctagctatttgcctgcccccttggagttggtctgggccgcagcctgagctgccgttcttggccccagggcccccaatgccgcccctgccagcttgctttttcttgttctccgctgccttcagcacctcgaaggggtccgattcgttgtcaaataactggtccaatcggttgatgaccgcgcaactgaagccttcctgtaagtgcccaggcatgatgattgctcggcggcacattcctccacggattgcagcgggctgcgcggagccaagagcgcctgcttcagctcatcccacaagatcaaagagcaaatttttaaaaatttgccagtaaatgtcaggcaaggtaaatttcaaaatgaatttttaacgtctctaaaatggagttatgtttgattatgagtttatgacgaattaaaagatagttctagatattattctagaaagcttcttgttctgggaaagagagagagtttggaaacttgagataagacctttattgtctattttattatttactgctaacaaactgcattttctcactgttcattggaataggtgggttcagggaacttaagaaagcctaatgggaagtgggaaaagtaaattatttcgtatatttttatgtgtacaaacagttgataaaggaggaagtgtagtggtggggtggatcatgcatattgggatagaagagatagtataattattaacaattatactggacattttggattaagtcctccaaattttcttatttgtgagggtacaagtcactatttacactatggtaagctgcatgcaaatatctgagtacctttctgttcctaccttcagctgggccagcactaagctgaaatagcctatacttagatgtttttctgaggaagtacgtttttccttttccctcagattcctggtgcctggtatagcacttttttgatttgctcttgttctggcaataggtcaactggctctcatggtccttaacatttcaggtaaataattccaacagttgtgactggaaggaatccaaatcaactcaaggcatccactctatgttcaaaatgccatgttttgagtgatttgtcctttggttagtaactttcaaaaatatgaggactggaaggaaaagatactatttgaggaactaatggaaaagcaagcagtttttgatacactaagatattcccttatgatacaaggagtgtgatcattgactttcctacttacctaaacattatgctgtcagagcatgtggataggcctagtggttaacacacatagaaaattcagactgcctagttcaattcccagcttcatcatttgctagctatataatctttagtaaattagttaactttcctgtgcctcagtctggttttcctgaagattaaatgaatttatatttcttaagtgcctagaactgtagctgatctgtaacaagtactgtatgtttttgtttaaataataaataaaatgaccggattgttcagatggaaaaacaggggtcttaggcggcttaggattttctgtaaagtaacagaatcatttgatggcagaaacaacgatattatcactgtccagaaccctaatggagaactatagctcttaagggtgatgtggggagaaatacactgatgaaagacaatcaacattattagacaagatgggagagagtgggaactagtcattcatttatctaatggcttagtcagcaagtaactatttaatgcctactttgggccttgacactataccaacattgtgcaggaagtgattaaaattcataagaacattcacttaggctgggataaacaagaggtcttttgcaaaatctgatgatgagctttttgatgttgagttgacaaactctgcagcaggtcagtggtggggggaaattatcataaaattccatcccttaaacatctacaggaagatgattattttaagatgctttacttctggagatgtatgctttacttcctcttagagaatctggcttatgttctcatgttctggttttatatgtaattggtcatgagcttaatttgatccaagcatttggcacagttacccccagaagttaactcatttgtggactgtataaacgctattgcacaaaaaagaagtatatatatacaaatagtcataatagaccacatctcggttaatagctttaagtctagatgaaatgttttaagaaggatattgacaaattagagaacattagaagcatttgccagaatagtgacatggcaagaaattatgccaaatagtagaaagagaattagacgcctaagtggaacatggtatataacccataagaatttgagggattgtcattggtagaataagatgttattcttggctgcttccagctgaggagtggtggatgggtgactaaggcctataagagagcaaatataaggaagagtttctaaatgctaaagtcaatttccaaagaaacagcctggcctctaagggaaagagcttcttgtcagtagatgtgtttaggtggggccagctgaacaagctcctgagctctggggattagactccatctgctggataggaggtacaactaagtcgtctcagaggttccctgtgttccaagattctgttactctgtgatttcatgactttgatgtcacctcccttaggttggttacgctaaataatgttaaaagtcagtgtatgccttaagattgggtgaattgctatgacgcaatgatttttaccagataagcggctgagtctaagaatgaaactactgtttctaagtgaaagaggtatgaaaacctaaagataatatttttctctgtagatagaaagaatttgtattataggtctgtgttggaagtatagcagggcatcaccagaattcaccctaactgggtgaattcacggcagtaatcagtggaatgtgtagtttgacaatgaggccttatcatttctaagtagtttctttttttttctttctttctttttgagacagagtctcacactgttgcccagagctttgccctggaactcttggagtccaatggcgtgatctcgtgtccctgcagcctctgtctcccaggttcaaatgaaactcttgactcagattcccgatttctaagtggagagttatgaatggcccaaagataatatttttctctatagatagaaataatttgtatctacgtctgtgttggatatatagcagggcattaccagaattcaacctaactcggtgaattcatggcagtgaacactgcaatatgtggtttaataatgaggccttattcttaaggcaaagctcagaaaagctgataagcaaattagaaaggtctattgaaaagtgtctgtctggccgggtgtggtggctcatgcctgtaatcctagcactttgggagcccaagttgggtggatcacttgaggtctggagttcaaaaccagcttggccaacatggcaaaaccccatctctactaaaaatacaaaaaattaacagggcgtggtggtgcacacctgtaatcccagctacttgggaggctgaggcaggagaatcgcttgaacccgggaagcagaggttgtagtgagccaagatcgtgccgcagcactccagcctgggcgacagaacaagactcagtctcccaaaaaaacaaacaggcaacagaacaagactgagtctctcaaacaaacaaaacaaaacaaaaaaacaaaaaaaagaagagtgtctgtctgccaacctgcttccacgaaggcccttcttctgattgtagaagtgcctggtttaggatggcagtgtgctctacctgctgtctggtgagtagtcaggattggacttctgtaagacactctgtatgagaggcttgccaataccttcagaatcaggcagaggtctttggcgagttatttctgaatgaagcatatctgcgtgtctgtctgatctaagcctgggaaccacgagggaagatactgtttaagcaacaacagcaaaaaaaaggcagggaacttaagagagacatggattttagtcactaagaacatgaagaggaacattttgataatatgtactctattttataaaacctgtagctataggaacatatatttgcctacaatatattttttttcttttttcacccttgatttttaactattttctacaacagtttttctttttttttttttttttgcccttgatattttttcttttcttttctttttttttttttttttgagacagagtcttgctctgtcacccaggctggagtgcagtggtgcgatctcagctcattgcaactccctcctcctgggtttaagtgattctcctgcctcagcctcctgagtagtagcttggattataggcacccgccaccacacctggctaatttttgtatttgtagtagagacggggtttcaccatgttggccaggctggtctggaactcctgacctcaagtgatctgcccacctcagcctcccaaagttctgagattacaggcatgagccactgtgcctggcctgcctttgatttttaactattcctcatgtgaaaatttaagtctttctatgggttaaagggaaccggtaaagagcattggatttatgcttgagctggaatttccctctaggtttggatatagtgaaggcagtggagatttgggtttataacagacgcagatttgtgaagctataaaatctgaagcctcaaggcccctcacttgcagagactccttccagggtcctggaagggaccctactaatgtgttattatggtcattattttataaaaattgtaaaacgtaatgtgtttcagccatgatttgttaaaattattgtcttcttccaattcaactttccctcctttgtccttccctttccagttgggtggcattaaagtggccatgcacgttttgtatttgtaattgtgcatttttttgtcttaaaaaggacccccaaccaaattgtataagtttcaggccctgaaaacatgggtcttccactgggtataggaatgaaataagtaacaatctggaaattgcctgtgtagcagaatcagccaaaagtcagagtcagcaatcaaaatgttgtgacgtggtgagtgagagtaaattcgaatccgtaatcccaacagcatttgacagtgggaaaatggggcttttttctcccctctttagggttcattttaaagaagaattccatgcaaagggtgtcatgaattgagaaatatacatcagattatatatataatatatattttttgtttgtttgtttgttttgagacggaatctcgctctgtcacctaggctggagtacagtggtgcgatctcggctcactgcaagctctgcctcctgggttcacgccattctcctgcctcagcctccctagtagctgggactacaggcgcccgccacctagcccggctagttttttgtattttttagtagagacggggtttcacagtgttagccaggatgatctggatctcctgacctcgtgatccgcccacctcagcctcccaaagtgctgggattacaggtgtgacacaccatgcctggcttttttttttttttttttttttttgagatggagtccctctcagtcgcccaggctggagtgcagtggcgcgatctcagcttactgcgatctcaactcactgcaacctctgctccagggttcaagtgatttccctgcctcagcttcccaggtagctgggattacaggttggtgccaccatgcctggctaattttttatattttagtagagacagggtttcaccattttgaccaggatggtctccatctcctgaccttgtgatctgcctgtcttggccttccaaagtgctgggatggcaggtgtgagccactgcacctggcctaacttatttttaaaaatagcaaattctttaaaataatgcaaattggtgatgaattatgaaaatcatgatgagaaactcctaactgaagagagaaattgtttgaaaactgtattctccttttcctctactactttatgtaattataaagcctttctctaaagttcctttctgacagagaaatactggccaacagaaattcaacggaaatttgagatttttgacattcaggcaatttatatggtgtttcaggtgttactacctctaatagtctatcaataaaaccctgataggggatggtctctcttttttgccttctactccatctcttctcgcacacccttgtgattgttgctagcattcacacttactctctctttatttatttattttttgagacagggtctcactttgtcacccaggctgtagtgcagtggcgcgatctcagctcactgcagcctccacctctggagctcaagggattcgagtagctaggactacaggcgtgtatcaccacccctggctaatttttgtattttttgtagagctggggttttgacatgttgcccaggctggtctccaacacctgggatcaagcagtctgcccaccttggcctcccaaagtgctgaaattacaggtatgagcctccattgctgggcacttactctctttttaattatcagcttgcaaatgagaaatctgcccaaggagcctgagcttggtgcatacaagttcatttcagccccatcggtgagtttatgattctatgagacattaaagatatattttatttggacatgttaaaaaaaaaactgtatgtttcttcacaacatccaaagtaattattttattggtgttgataattattattgaggaatagggtaatcatgcgtgttatcaaccatttcctaaatggtacctagttaacatgttaggggagggaatctaatctgaaagtgatgcccatttagtgaagccaagtgatgtagcaagagttgagaacaacttataaagggacctcttagcccatgtccagaacattgtcattaacataaagataggctgccaagggaaaggacaactgtatggtcagtttacccagatctgaactctcaaaaatcaagcactctcattctgttagggtgatgtcagagaaaataaccttcacaaggtttgaaaacacagttgtaacatactgggctatgttccagggctagcattggctcagatttttatcttgtgcttagaaccagcctactgttgtctctgcagagagaacactaagtaggtacttaataatactttgctggccagcacatagctctgtgcagaacgaacactaagtaggtacttaataatgcttgcaggccagcacatggatggatcatgtttataagtgtgtatcgtaaacactttgccttcaggaaattgtttcctttttagagttttcatactgtggacatccttaaaaatcccagaaaatgtatctttatggattgacatgtgactcctacatgttaagttagaatccaatgaaatgctgttctttgggctaaactttcaagactcatgtgtgtggtgtataattcattaactaaagatatgattcatactttaccttatgtaggaccacaggtatccacatatccaccattaggatattcttcaaatctcatagtttggaagattttcagacattgtaaacagtaaatgcatcagaaataagcattttccagaagagggaggtatgaaatagtgattgatcagcctgttgcttagtcctggaaatgtgaaatcagatcaatacgaaaaagatgctttccttgcattctcttccagaaatatgcagcctgctgctcttttgtcttcagtgtaatcatgctgcagtgaggagagcccagaactgtttttaaattcaaaaggacaattgctttctgctcactcaggtccactgaggcatgctccaagacaggaaaaaggtgcttagcaggatctctttgctagagattcaatatgtgaattttactttgagaataaaaagttcacccacttttaaaaggttaatcaaaagcacattgtagtgtattcttcctttcctatgcaatttcctatggaatctatttaaattctggctgcagagcagcaatatttttcaaagaggcagtccttctgccaagtggctctagaagtacccataatctccatgtcagaagtatggaaaatgaaagagatgaacacttccttcagaaattgtacctttgattcctttactttacagccaggcaggaagaatcctgagagaggcctttaccgaaagttcaatatttatgagctacatactgacaaatgaaaaatgattcctagccctgagttgcttaccctatcaagtttgcccattattttcaggctgttgagcattgtttgaaaaatcgatctgggagctacctgagtctatccattaccatggtcttgctgttataaattcacactgggttatttctattccctaagtttgctctgccctttcctaccctttacctttatggtcttccatctggtaaattttctctcacccttcctggtctagctgtccttcgtcttcacttatgaaggcttccttgttttcctttttcagaattaattgctaatttctcactgctctctaagcattaatacacccatcatagccttcatcataatatgctttgtactgtagttatttatgtacttatttgtttttccccttctttgttcttcagttaaatgcatgccagatccaactttacagatgggaaaaatgagctctgaagtttaataacttgcccaaggctacccagttagaagagttatggacttcactctgaatatggtgacttttgttctcgtgtgttgccttctttagtcttcttaagaaaaaccttgtcttgttttcttttctccttaggttgacttattctatacattagaagtttctaaattataatcaaactggcattccaaggtcatagccatatgtaaatcagaatgcagttttacatagattcattattactgtgcgtggagattagaagccagctcacaagaagacttaatttggaaagataaggtaaccaactttacatgagtgctagcctttcattgatttctcacctccattctatattcctcctggcacttgttttaaatctgttctactgaagtccatactctacccccttgctctcagccgatgatctgtttacctgctctgagaagatttagatcagtagttctcaaactttaatatgtataaaaatcacatgcagagctctttctaacatagtttcctgggccttttcccaggaattctgattcagtaggtcagggtggggctcatgagtgctccgttctaacaagctcccaggtgatggcaacacagctggtctgaggactacactttgagaacctctgatttaggccatcctctgagataggatgtcttcttccatacgtcttctctggatgtttatccttcctctccttctgtgagtgagaattcagtcattctattctcaggctgaaccctctcaccacaagcttttatcccatctcacttcatctatttcaggaccttgcttccacttgtctctctttgcatcttttatgtcaccctctcaattgccttttattctcccctgctttactaataaaactgttcctttctcagttgtactgttttagatacatctaatgattgtaagcaaaattattttctataagaatgcttgacaatttcagattcaactcagttggctaggaactaagtttctgtaatttgggaattgacttgtagagagcaaaattaagaaaccaagtttaactttttttaatggatgtgagtggaagagactaatgagatactacaaaagagttaacttcttacatttctgtagtctaatacgagatagtttctccaggaattaacatagcacatctggttcactgacctgagtttgtttcctggtgaggctttgcagtatcatccatatctcaggcaaaggtattccagcattttgtagttaagcagttggaggaggagtagggagaacttgtgtactttgaaacatttcacaatgaactactttgcattctaatgatgttctccttacttaaggactttgctatgtaaagatgctttgtccttctgataatcacttacacttttcttctgtgttcatatcacttcattaatcctggttacttgtaatgaatcataatcttacccacttattcttgtgtgactcattcctacttgtattctttttttttttttaatttatttattattattatactttaagttgtagggtacatgtgcataacgtgcaggtttgttacatatgtatacttgtgccatgttggtaatagttgtctgtgtctgataacacattgtcaattgactatgctatttttaatgtaagccttggcaaaaaggtttacttagagaaaagctgtacatttaattcccccatgcctcagttcccaaatttactaataaagattatacttagctgtcactccacatttcatcagtagaattaaaatgaatagagattatgaaataagacaacaaaaaagatataattataatggaccagaatgagaaatcactacagatcaatgcaaatgacctgccatgtcagattcctagatgcagtttctttagtcagtgggccatatttcttcctcattctttgtttttccatcatgccttccaaaactaaattttaaccaagaaggaaatatcatttgtcttctgatataggaagatcctactgagagattatattcgtatatttcatccatcggcctataggtggaattgtatttaaaatactaataaaggttattattgcttatatctctaaaaatgctccaactctccaaataaggcttatattgttgatgatatttatcagtggctctgaacacttgcatatcataaaactctccctcaaaatttaaccttaaactctttcaggcttgtcttcatcacagtgggaactgaggacagctgctcatgttttttgatagaacagctcttaacatgcttttgctcttgcctcccactgcccaacaccagctgcgtacacacactccacttgctgtgtgcatgctctggctcctggctccttttccttcagctaagttagcctggttttatttggtttcatcatacgaagtatctattagtaaaacttttatgaactctgattatagtactaaactcacaataaagtaatcagaacttcatttattaaaacactgggctgagcttattttttaatttagtatgcatgacaattttgtaaggtaggaattttcattccccttttatagatgggaaaactgaggtccagggtgtaggtaacattttcaaagttaactcagaagtaaatggcttagctgtaatttgaacccaggttcctacaattctaaagcccacccttttaactgctgtgcacacaattactgtgttcttacttgctctctgaaatacaacaccttattctcatttcatctgctctttctgccctatacacttcggtttctgctctgtagatacctgctgtggattgtgacatctcaattttttttgtaccttggcagggttttgattgatgtattggtgttccgaactctttagcatatatattaatatggaagacctaccaaatatttcatctaatagggattattttgtctacctatttcatctttctttataatgtaagtttgtagaaggaagaaactataaattgctcaattagggactccacagtgagccaagcgcatacatacttgacccagagaagtcatcgccatctttatcaccacagctaacatatgggtagtgctcaccatctaccaaatatgtgcatggattattttatttactctttacagtaaccccataaagtagattatgttgccatcccaaggttaaaaaactagtccacgttcatcgagttactgcatgatagagttcgagcctaaccaacaccaatctatccacgcatctgtccacacagttaactactccacacttctcagtggaatctacagttccatgtatttcgtattccttccatttttcactatctgtcctcttcgccatcttagcctgtttctctccttttcactttctgccctatgcatacctgctcaatcttcagtcttctctgccttaccttctctttctcaattttgttctcgttctgtcctatcctgcctccccactcttcttatctcattttcctagtccccttgtcacctttttacctcttacatatttctttttaaaaagtaacttcaagcttgataatagattcttcaactctcttagcaatatcttatcctaaccataataaaatgataaagtgctaggtgtaaacagaagtagaatatgaaattgaagtgaagaatctctttactttttctgttagaaacgtaaataatgagtgactataacatcttggtctccataacttctaagtgttaaataaaacacatttctctttttttatttaacacacacacatccacacacacataaacttgttttatgcattgattgccatttattgagcagcataattttggaaatgcaatagctacaaaacaatttttaagttattatcatacagtgacattaataggctcatcactttgctttctttcctttgttctatcatgtagagagttgctttagagatcattgtgtattgatatgaattatcgttgaagttttattagtctggatgtctggttttgggcattttgataaatttcttttgctccaaatccagaagttatggccattcagctttataaataagacttttttaaaaaggcaaagtcataaaataaatatttcaaagcagtgttagatatagccagctgaataaactgccctttctatttaactttgaactctaaacctcatttaaatatcctcccttttttctctaaagaaggcaagaaaaaaaaaaaacaattacagtagattctaaaataaaatatagcaagaacatttttgtaagagatacctcagatagaaggctgtaataattgggcaagtatttgcacctaaccagtagaacttagaagagaaaacgtgaaatgaacttcttagcttatggaatggtgtggataggtttgcattacttagatgtttacagagctctagcatttacttactgaaacactggaatggttcatatccctgtggtttctacctcatttcttccagaaggattaggttgtatgctgccagagaccacactgactcttagtaatgggatcaccaaattctggttcacaattttgtgcatagagagattgcactaatatctcaaaattgtagctctgattataaccctggtatagaaatctgagctatgttggcagtgccatgctgtacagtcgaatccacctgattatatctgcatttgtgacagctgggctggccttcattggcatatgcctctttgctgtgcccagggctttgaatgcaaaatgaaagatcagcatgatattaggggcccatgatccatagaggtagcttcccaagtaaacagtgtctcagctttaacatggcccccaatatcctgctttatttttctggactgaagttcctatgacagatttgttgctttcaaaaagtaattttgcagatttgtccttttttaaaagaaataaaatttgcctccacttcctactgaaagtgatatggtagtatccatcttataattgcacagattcaaaaataagccacaaatatgttagctgaagtataactgtggactataaaatacagatatcatagcctataatatggagggtagtttgacgttataaagccatttttctgtgttttacattatcataaaatttaactactgaagggaaagtgaaggttttaatatttaagtaagcctagcacttaaagagaaacacacatattttccttggaaaaaaggaagttccattttggacactgcaaatgacggtgccagctgttgtcatagtatttctagcatccactgaggattaattccaggcccagcaaattcactggatgagcagaaacagccaaagaagtaaacactggtgcttctgccgtggtattattaaattacgcgggagacttctgcaaagttggatatctagtgaacgctggattatcatgcctgagcatcattcactttgtggatatctgcagaaaactgaatcccgaacttgctttcttctgcctcttggccctcttcctctgtagaggtatactcagaaaatgtgatctcatttgaatataaacttttctattaatattcattaagtactcatacaatataagctgaggaaacagtggtgggtataaaacaccagcctgatgtaaagagcttactttcactgtagaggcaagatagcataatgaaacagagatgggtttcagaggcaggtggaccagaattcaaatcctatttcttctaagtatggccttgggcccatcacttaaatttctgagactcagtttccttttctataaaaggtagatactaaccatgctacagagttctgttgagaattagaaatatttacagatacttagaccactacaagatagctctttttctagaagaggcataccttattatatataatctatgaaacagaatatggaagatgctaaatgaaaggtacaatcagagaatgccccaggccctcaagaaggaaggtggaatggatgaggaagtctgctgtccaagggatgggccggagctaaggcaagatatgtgtgtgggccttcactaactaggcacagggagagggcattccagcagcaggtgtaggtccggccaaggaattaagacaggaacgcaagtggcgttttccaggcagaagattaggaagttttagatcagcctggatacagagaccttgaatagcaagccgactgaggaatgcatggaagaatgactactagctggagtaaaacataaacctcaaggcctcttttctctttcacctttcctcttgcccacatcacggacagacagttcttgcttttccttatactctgtttctgtgagcaattttaagaaggcagagtgcataatggtattacttttatgtctgcatgtgtattgccacatgaagcctgtagttttgcttttcaaactactagattgtgaccttgtaatgatctggcaaaaggctgattgaatttataagagcagtaaattaatatagtggataatagtgggaaaaaattagtggctaatactggggaatgagaagattaggaaagacataaataaaatatgggtggtgtaaataaaacttaaagtgaaaatatggggaagggactgcttatgattcaccttacagccatgtagaaattttgattaacagagcagtgtatctgaggcatgttgtaaagaatggactggggtctgttttcactgtcgattctttctgcgagtgcatgttcatgaagatattggaggctatttttctataggcaactggtggttttctgctgtaggcagaagtagttgaggtaatcctagggaggtgacactgaatggggctgtggtcctactttatgtaaggttattatacgtgaaagaaagagtaatttttaaaagtaattaactagtggtagattatgaactaacactagcaaaggttgattataaatcagattttctttttactactgatttggaaacaatctttggagaaatagatttggaatggttaaatatcacttttgggagcacattttgctaccacagcttaacggtactcttaagagaaagctttacaaatggggcaaccttgaaagacacatttcatatgcattcaaattcaagatatgaccgaaagctctgttgccagggtaaaggttttgagagttaaatgggaatttggaaaacaatactcaaaaattgacttaaaatgcagatgcagataagcctacaagtatttaaagtgtggagacatcaaagaatgtaagaaatagtttggatcactaacaggaatgtgtaatgggaagtcaaaatctatgctgtcaggaaaaattcatattattgggtagaaactctattatttggtacatttaagataaaatgaaaattgtgttttcaaagggttaggcctcatagtggatgagtgattggggcgttttctggtttcagtgattctgtaggcagaaaacagtttttactgccaagtgtgtcagtgaagcgggggagatagagaccttactgtgttaagtgaaatctgttgcttaagaataaagctggcatttctgtagaatggagaaggaatttggtattatcatatcatcaaaaaaaaaaaaaaactgctctttgaagagtagattttttaaagtctgattatcagtatttatttaaaactactgcctaagtatttaaacagtttcaggctctgattttatttttgttaaaaaatgaaacctatgcctaaaaattattttaagtagttatatggatagatgagctacacagtttcagacctgtgtatatgactttttaagaggtctgtggtatccaataataaatgatcttatgcagggatttgacacataatgggtcatgcattatctataccttgttaatgggatctgtatagagtgatagcagaaaagaaagttaattttaggatcctttaatgcctataaatttagagcaaaagaagtatttctaaaagctcatcttttgtatacatatgcccaatcacaagttttaccgacatttttacacgttttaggcctgaagtatttgattcagctcttatttgtcaagatacaatatgattacattagtaaaatacaaaagggcggataagtttttcttcttttgcctatcttatagtcacgctgcaaagcctccatcacacttttttggctgaggtagatctagatgtatagaggccaactaatatagttttatataatcaacatagggaagtcatttcagagactggcattgagctcttggagggaagaaaatgaatcttaaagcttcttgggaatatccctcactgcagcagaggttatgtgctctaatggatgctccgtaaatgcttgagagaatataagtcccataggttagcatgtacttaattctacctaacatggaaacctctccatacattctatagctgaattattttaggagctcaaaaggagtaacaggaactaaagggaacaccagctccaagattggatttttaggctttcttgctagtgtaacacttcctttcctattggactattggcaaccatatcctggctaattggaagtgattttcaggggaaaggaagaggtcataagttcttgcctccctattttccttcttgttgggttttagtaacttaccttaagacgtagtgtcatcctattcaaactcctaatattcagaaaccgactttcattattcaaacatgttgaggaaaaaaatgtctccttgcatcctcctctgcttaaaacttctccagtaccatcaagcgtggacagatatatgacagtggcagtatccagaagacacaccatctatgtaacaaaccctagaaataaagtatggtataatcctaagcattcacttggcactgtcgcttctgggaatttgctatgagtcagccacaggcatctctgtgtaccttcaagcccagcttagcacatatgggaggataagagagaacatgtacttcttgaatacatcttctatagagtaaactaatccttagctaagttgatgatatcctcacccagaatttaaaagttcagtagagactcttcttgaaatgttgaatttttatttctgcttattgccctttatagctgggtgaaatgcagtgaagatattcactggtactataaaaatgcattggttctttttggtgagctacttgactatcagagccaaatacgtaggtagttggaattaaatttccaatttagcatcccccttagaagggtgatagaagctccaatgtcttggtgtttctgtttctgagtatctgctgtctcactgaggcaacatgctagcctccatgttgttttatttcacagacatagaactaagtgacacatctgccaattccccctcccattttctttgatggaggtagattacatttggtgtagatattgcttgaaggtacttgttgttctttcttacaagtaaacaagaaagagagcagcaaataatagctagaaggaagatatgcccacagcacattcaggccacttagtctatctagtaagtacttaagagtgtttcaggcatcaagcatgtactgggagacatgcacacagaaaaaggacaagcaatagattcctttgagagtgacatggtaggtctgaagagtgaatgtaactttttgtctccatcccctcagtgattcattaattatttattagctatttttttccaccaggattacaatcattttacatttgcttgccagcctagtgggttattaatagtggttactctatttatttacacattttctattgtacgttattcatcctttattagttcacccccacccctggtcaccattcttttttctttcgtttgacctttcatggctaccgtattatcaagtgatcaggaaaaaaatgcactggtgtcagaattaggccaacacagacatatgggatggtaggttcatttgggttgggtagagagctgtttgaaacttgtatacacatttttcaatttcaagagggaacatttacagtaaaggaagcatgatatccatagtctgcagtggtctaatggaggtgagctcaggaatctcagatgcatgtagctctacaagtctccattatacaaattatgttgaatatttcatctcttgcgacagattagttttgggccatcatgaaaaactttcctgaagattaagtcaaacttatctatgcatgccttctttggatacgtagatccacccttgacagctactctgtctactaattctgtcaagtaggactgagcttttctgaacacctctccttttgttaacaagaaggagaagaagaaaattaaacactcctggcatctgcctggctgtgatttagcccttggtaaagagtattacaaattgagatggtgccagactgctcctgtgattcatctcttctcctgtcaagaccagttgaagcgatgcaattggaaacctctctagtttgtgaagagacactttatgttggaaggaacagcataagcagaatagtacttaggccttcaaagcagagacaattgatttctctggattggtgaacaatcactgcaaattaaggtcaaacgtattatcaactaattcagtgtactaggcttcttcatcatttcccacgacttgttctcttttagaagatggtttagcaaattggagcaattattttttaaaaaaatcttgctgcagagttagtgataaaacacaagaaagtttaaggctggatatagcatgtccatctttatcaagacgcagatccatagagaggtgtgcttgctcttgggatactgggtgaaaatccaggcactgtgttgcgggaggctgatttctgaaagttggggcatcattgtttggcctgtgacgtttgtgtcaggtatgtcttgtcccacagaatactttttatagctgttaaaggacagattgtcttcaggacaattggtacccgtgccagagtatggtatattctgaaagaaaatccatttactctcatctgtaatttatccccttagttgaaacatgatcccagtgtaggacatttacttttcacattccatttaaatcagtgtagtttcttcctatcttaatgaattttacctcatttctttgtcttgcaaaaacccagggctgaatggtaaaatttcaaaacaaatctttcacaaggctggaactagacactctgttgggtcacatgcaagttatttgcagaagaggaacactttgcatgtgaataagagaaagcaaagcacttacaccaatactcagtgctcttggggccaggagtgaggggccttccatgtttgcaggacatctatttgggccttatattctgctacagccccaagtccttacctcatatctgcctggtgtcctatttttctgcttaaagagtcaaagactgaaattcttatcagtgtttcccattcattcctaagttactttggccttcacgtggagccaccatgctgtggcccacaaagtgtgctattcacttaaacttatttatcttaaactttttatgaattgtggttgcattctttgactttctttgctgatcacagtttacattaatcctgggacatttgactcttaagcgctacatgatagtactatctaatggtttccaatgttatacgaatgtctctctttcccatttcatccctttctctctgttggttttgacttgaagctctctggttgtttcatggcaatgattattagtgagagtattatctattaccaagtgtttcttgttcagttttgcatagtttcaatgtctttttaagcaaggattgccaaactacaagccacctgtttttggagatgccatttaattggaacactgccatacccattcatttacatatcatctatggctcctttctcactacaagggcattgtttggtagttaaaacacagaccttatgtaccttcacctcaaaacctagaatatttactatctgactctttacagaaaaagtttgctgatctctgctttgaagaagaggaagtcatcagatacagtgccaaagaattgctggctatgaaagagatattgcagaattctataattttcttaaagaatggaaaacactggaaaagagtcacctgtttacaggtgatttgcatttctataggtatcagaataatgtgtgtgcttgtaggttggggaaggaatggcaggcctctctctgtcagtatcttcaggccctgaagtcatacaatcaatggattgcttttcctcttcacttttccattttgccataattttcccaagggggaggttggaagtaggtgaatattttgagctaaaagagcatttggatacctcctgatagttactttagctcagatattcttagattctctctactgaaggccacaccttctctgtgcctcagcctggcatggtccagcgtgctacttaccttgggttcctgctgctcagcttaaagggaatctctttcatatgcctagagccttgtttactcagttcaggtctgtgccagttgacgccaagtcaaaaagcactttagacagaagcttgctttgaaagtgctagctagtagcaaataagtctggcttaattcccccttgagtctggagatctgattggaagagtaaaagggagaaagggatgatttatttgttgactggattgactactttatattagtaattatgaggcaattctacccacattatcgcatttaaatctccataaaaccctacaagggaggtaatatgctttggaaaactgagactcagagaaattaagtaaattgcaaagtccttatgctataagcattatagtctcataagcaaatgtcatgagtttcttctagctttttcctcatgctcacaaaatggttgaaggagatccatcatgtttctagttaaaaagaagatgcagagtaacaggcaaaaggtaaatggacaagccaatcaagtttattctctttcctagatgtcctacttgatgacttcagcttatatctcattagtctgcatcataggattatctctgcaagggaacctggaaaatgtagaaatttgtgttaagctgggcaccttgccacctccttaaaaatgtgctctataggtacagagcaggagataatcattattaataggcaacttaccgtctctgtttcaagaggtcgttctggtacctgagaagattgacaatctctggtctacactcttatagacctctcttgccttcatttaagatgaacttgatagaataaagattattgttcttctctcatctcctgggtatgagacagagaggtaacagatggaatgacttccttctggcttccatagcaaaccaaagcatgtgccagtgaagagtggcaactgctacaaatacttagccaaacgtggggaagagtgttgatgctctaagtctcctagctatgtctaggcagcaggtgtctctgtagatcacggcagcaatccctttggtaagggcatgaagagggcactcgggactactggattgcatcaacttggcagagaaaaatgtagcatgtactggagctctagctgggtagggaattgacaagttgaaccacaaattgactgctgttcagtcagcactagcttttatcttccagtcaccgttccatgtggctcttcgttgatcatccacaagctccaggcctgggtggtgcctgttgtgatataagaagggaacagtgatgtctccaaaatgtgaacactcatgtgtacagttttcatattggtaaggaaatgctagaaggggaacagctgtcagatgcctccctctgtctttgtacatacctggctacccatggcaaagttgttgttgtttccttccaggcatagagccgcaaatgtagaaaacaagcattccagcctgcaaaagaaaactgaatcccccttgtttggtcacttaaggaatcaagctcaggagggctggacgtgttttctgttgctctacaataggggttgaaacttagttcaattatggtgcttagctgaagcaccatgactgaacctttttttgcgaaggggaaaggagaagattttaaaatgaaatgccacaagtgtaacatagtacatatagaggtcacaaacttggaaagcctgtggtgtcttggaagatcacataaatgtgtgaaacacgccagttgcacacaggcaagcacatgtcccttctacagaaattattgccacagaggaatgctggttctaatctccatcctcccttcccctcccctctgctcctataaaaaccagaggtttggaattttgcgtgaataactcagtttgttagtgttgacaaccagggatgacagtagctcatttgaaccctttgtccaaatcaggaaaccgcagcccttccttcatggcagccctgtagctgtgccagttgagtgtgggctggatttcagcccttactctctcccttagctgagcctttgtgccagacacaagctgcccaactgtagacagtgggctcagaagttatcagtgttacatgagcaaaagaaaacatatctatggaccatactcagcccataggttattattttgcagcttctgcagctgtggtcaaaacaaagctctagggtcagatcacctgggtttcaatctgggttctgcccttcaggcaaatgactcagtatttctcggcctcagcctcctctatctgtaaaatgaagataaatacttgtacctacctaacagggttgttatgaggataaaatcaataatgtgggacaaacacttagctctacagagggtggcacatagcacttaatgttatataataccaaaatcatgtgaaaatctgattttttcagacttagagaattcacagcatatgaaatgaatgggagagtgcatgtcagacgtccatgattattttctgcttcttgaggaaatgcttatgcctcttttgtcactgtgaagacaagagaactcgaaatagtaagcattacttagcagctggcctactaaggccacaagaacaaatgaagtaaacactctacttgaaccactgattttgtttgcctgcataaaacacttgcacaggttgacagctaacatccataacaatgacatcctaaaaccattaagaaatgattaaattaagttcattatcatctgttgcaaaagacaaagatgtgtgaggtacgttttagaataacttacaatgaaaacaactaaaaagtgtggaagtttaaagtggcaagtattcagttacttgagttcatctgctgcactggtgtattctctggaagctgggccacagagttaatattccatctttaaagactgtaacagttgttttcatctaagatgcatcaggttctgcataaaaaatttggttgctggcactgagactgtgctaggaggagggtattaacttagtactgaccataatgaaatctgtggttgactgcaaggacttgggttgaaataagactaaatccagtagtattgctctgataggttcaatcatattcaagtgttcaataatgattataaagaaatgtcaacctgtcatacttactttaaaatatgtccagaaaagagaatctaagaaagtttatttagttccacctgcatgtaaattagcttttttttttatcatgacatcaatgtcattaggccctaaatgatattaagagtgtctatgagaccccaaagacaaagattgtccccaaaactcctattcttatttgtttaacatggacttggcccagctaccttcaatctaaagcttctttctctagagtaaggtatctcagtctttgcactgttgacattttgggccagataattctttgttcttggggctaccctgtgcactttaagatgtttagcagcgtctctggtctctacccaccagatgccagtgacctccttcccctcaactcatgacaaccaaaagtatctctagacattgctgtaatgccacctggggagagaatcttcctggtgagaaccactactctggactaagaaaagtagccagatttttaaacacagaagtgtttttcctcccgggggcaaaaagtgccctagagatggaagaattttgaaaataagctcttccacaaactatactgccaaaatggttagagaaagatcgtataatcaccatgcttgacaaatgatgtttttgctaagcctcacagcagctttgttcatgtattgtgttaattgcaattaaataaactagtctagaagtgtgggtcatcatccagcccattcgtatccctcctttacagtacacgtccagacttctttcagaattttgcttgcccattggtgctcacatataaaaactcagtgggtgagagttagggattcatagagcagagagggacctcagcttttcatatctacttttcttgttttaaaagacaaggcactgaggtccagaaagtggaatttgcagcacaaattgctatgataaacctcagtgattcagcccctcggatcttcaacaatataggcacagaacatataactattactgagtaaaatgtttaaaattatgttcttatggcaatgttcaagattttaggcataagtaagacaaagcagaggcaaaataaaaaatacttttcaaattgaaggcttaaaaaattaaggatatcctctatgcaccttctgctttaggatccagaaacttatgtttgtttgctctttataacacatgactgtgtaatatcagccaattgtgactggtaaatttccattaatttgcctaatcgtatttagaaattatgcctactaaataaattatggttggaacttgaaaggaaaaatggcttaaataagtgatttgttctttagtcagaaaaatattctcactttctctctcttgaaccctcatgaagcactgccagctccacctagtttataattaaggcaatgggaccaaagtcatcctgttagcacaggctggccatccctgtatccaaatttctttgactaattggagaaaaccactaattgtacattttaaactcaaaatgtctttaagtatatatatatttaaaatatattttatttttattaatgtattaattataattatattttaaattatatttataattatatttagatttattatttaattaaaattataattatatttattaaaataataattatttttattaattcatacatgtatataatttatgttttctccatgtggttagctgttgatctaaaggagaaagagcaaggcagaaaaattatcaggttcagtgtttaactgagagatgaggacatcactaaaagaaaggtacagcatgttctaccggtacatacaagttttgattacaaggtgtactcttgccgcctgttatggtatctcagctaactttagtttgtgattagtgggatctctgagacaactctccgtggtcaggtatagagctcattttgcccttggcatgttccaaatcacttcctatgctcaaccttctgagcaatacaagaaaaacttcctagtgtggcatgttatgaaggttattttatttaattttatttatttatttatttatttatttatttatttattttttgagacggagtctctcgctctgtcacccaggctagagtgcagtggtgcgatcttggctcactgcaagctcctcctgacaggttcacgccattctcctgcctcagcctcccgagtagctgggactacaggtgcccactaccacgccgagctaattttttgtatttttagtagagacggggtttcaccgtgttacctagcatgatctcaatctcctgacctcgtgatgtgcctgcctcagcctcccaaagtgctgggattacaggcgtgagctaccgtgcctggcggaaggttattgaaatacttcaggaaatgcctttgactttgttttggacttaagatgatgatttcattcagaaatgggtatagtgtcaaaatatggaatgtgctagtaaaataatcacgcaattcacttaaagaaacgaaaacaagacaaaacaaaataaaacttgtttgggatgggtgaaaggcatggggctgccgttcatcctgattttaaggtgagaagtggttgaaagaaatgtgatatttttacctaaaccatggtcgactatactttcactttttagcaatgatgtgaatgaggaatggctttgaagactgttggtggatttaacaaacatttatcaagagcctgctgtgagtgccaccattgtaggtggtagaaattccgcaataaacaaaacagagtcctttcttaaattttgtgaagggagaccacctgtaaacaaatatacgtcatgtcatgtagagataagtgccatggggaaaaacaaaatagggtaagaggctaggtggagcaggatcagaccaaggaatttatattttatataagattgtcagggaatgcctctctaattagatgccttttttgttttttttaatagaactgaaggaaataaaaggacgaggcttatggatatctgggggaagatgtcagaggctgttataaaagttacaacaggaaactgattaggactcttagccgacttatatatgcttagaatgaaagggattgggataaaagaaaagaggggagctttgggaaagcattaaactgtggccacagtactgattggataaaccataacactggagtgtctgcaagtttctaacatttttttaaagtatcagacccatagccctagtaataagcaacatggtcttttcttttagcatggttgtaatgaacatggtattcttttggagttatcctgcaaagcttacctactcgggaagtaatagtttatatgcattgcccaagttgaatattattaatttgggttgggaagtaatatgaccacattctgactgactataggccctagtccagttcacctgattttatgcccaatttttaatgagaagggagcttgctaggccaggcaggaagaaatggggacagtgtctaggaggaaatgcagaagagttgagtgtaggtaaatcccatctttcctggctttacatcgccttcacatccctcatatgatcttctaccccagtcttcagtataagcagtattttgttctgaagaaatgaagtcttggccgggcacggtggctcacacctgtaatcccagcactttgggaggccgaggcaggtagataatgaagtcaggagattgataccatcctggccaacatgatgaaaccccatctctactaaaaatacaaaaattagctgggagtggtggcttgcacctgtagtcccaactactcaggaggctgaggcaggagaatcgcttgaacccaggaggcggaggttgcagtgagccgagattgcgccactgcactccagtctgggaactgagcgagattctgtctcaaaataaaataaaataaaataaaatgaaataaaagtaaaggtatgaagtcttttccaagctaaggcaagaatgctgaaacctcaatcatagcacttttccaaaagagtcttaccttatattctgaatctcttccttatctcaagaggggcttctttctctttaaatgtgaaaagaagagaggcatcagctagccctattagcccagggctaagaattgctccagatttttgaatgcttaaaccttaaactaggtcacatgtaccagtggaaagtggctcccctgttttcaaggacagtcagattttaactacctgcctcttaggcttgccctgtctttggggttgttaaatatgcatgttgggagctgttgactgttttttttttttttttttttttttgtcttataatttacttttattttaaatctattatactttgaactgttgactgttaaagaaagcagtactggcttaggatcagcagagaatatgcttgaattctatttcttaaactgaggagaatttctgtttgagcccagtccaagtcattacttgagcaattttttgtacattttgcttgcttaagtgtttttttttctttttgcttttacaagtaatttttttaaggttatcatacactcagcaaacattttttgagcacgtacacaatgcccagccctgtgccatgcatgttcgaaaaaaaaaaaaggtaacattatatctgtgcttgtggaattaatacatttgttagaaggataagacttcaatcaataaagcaatccaagaaggaacaagtacaaagcctggtaggagacattagctcagtggaaagagtccactgaggtaggtagacttgggtttgagtcagagcttagactctaaacaagagtgtgcttttgtgagattttgcttatcctgtgtgggcctcagcttcctcttctgtaaaatgggataatagtacctattacattgtcacattgtattgctgtgatgacttgataatatttatatacaaagcaaccagtataatacatgctcatagtaagcacttattatattattattatttattggacaaataattagatctgggttataatcttgattctacaattatttagtttcggtaaatcacttaactttatcataccgttcatgcgtattacctatagagagaagggaacagaggttctacaatttatctcccaaattccatggtattttgaaacaaaatgtattaaataagtctttgatgtatgcttctccttcttgttagtgatattaacaataacaataaaaatcaatatttatttaggacttgctatggagccacgagtcgtggtgggttcttgacattatgttatttactccatgctgcatactcagtgagacagataaccttgtcttgtttcctagatcctaggccatattttatccagtttaatatttctgaaatcagaatgtattatatagttaataaatatatttaatgtggaaattttttcccaaaagccctttctaagtgagatggaccctcttttaattgaggatgtcttccaagggaaataaatattttttctatatttctgatggtacagttgaggcatagagaggataatttacgtcaccaagattaatgaagtaacaaaagcaaatttaggacttgaacttaggtttgttttatttaacaatactcaccctaccaacttcttgggagcaaaaaacttaaaagtttctgacatatattcattaattctttccattttttatagcaaaatatatttgatctatcactagaatgaatgatagattgactatttattaacttttaacaggaatatattttagtccctctagcctgactttataggctatgtactcagcacatgaaaatatatagtagcctcaatttaatgttgatgtttatttgatgttgacgtcactagtgacactggtcaagtgtatccttttagataagatcctattagaattatatattccctgtagaaattttaccttgaccatagtacatttaatagcagatttttctcagactttcaaaatcctgaaagtctgggtcattacaagaaaacaaggatgtggtcataaacagttgattattaagcaaattcattgaaaattaacagcagtattctttgacctcactcttcatagccaaactgctaatcttgggtaaatataagattatattactaatccattgacatttagcagaaattagttatcaaatgggccagttgttactgttggaaacttatgaaaatacattaaaattcttcccatttcctgtatgtttctttctctgacacagaatcttagagccttttattaggctgggagaacttcccaaataatctaatgactagttgaataattgtctatgatatcaaatcagctttgttgtcaaaatgattacagtttcagggtcacagttaatagaaaaatatttaagtgaaggttaccattctcgttgtaagtatcctttgattcaagaagtgaaacttttattgaaaaaactgtttgcagagctggttccctgatggacctttctgaagtttttaaaattaagaaatcctatctctacttttaacaagacaggaatgttagcatattcacccagactaaatgaatgagtgaatgatcacattacacatgcttaggatttgatttccttcctctggtgttccaatagactagcagcttcaggactgaagtgtgattgtaaaattacacatggtggaattcaaaatggtgtacatcagtcaggtcctggcaagacacacaatctaactcagaagtttcaagagactttaagggaaatgtacaaaagtatgggtagaattaaagtaactagcaaggaatgctgaggcacccaggccctagctgctatgagaagctgttatctcctctgggcctggagctgcagaagaaggaaactgtagtcctgagagagctggagtcatggaggaggggttctgtgacagaagctagagttctggagagacataggctaggccagagcataggggaagacatccctgacctctccgtcaaccttctaatcgccgttgttcaaacccagtaggaagttagccagcattgagcctgtagagtcagcccacagcagtcagcctcctgagtgcagagcagaggaagacctggagtggatatgccataggaggaggaccaaatagagagtaactagaccagatgggaaatgctattttagacctcatacactgccaaaaaagaatggcatattcaaggaacgcagggccttgacctcatttgatcttggatttgcatccattttgtgatactttgttccaaatacccttgtaagcatctgacagcagccaggagaattgctggtcagttcagcctgtcccagcttcatcgctgaggtaaatatgtgtttaaggagccgagagggctggtctgatagctcaccaaagggggactttcccaaaggtacatatgtgtttaaggagcagagaggctggtctgatagctcaccaaagggggactttcccagggaaaataaagagaaaattcattgagaatctgtccagaaaggacagtaagtaggcatgaaatgatagtagtaaggaagcatggaggaggcaggtgcataaaaatgatttctgatgtttttgaagctatgtgataacgttctgatccacactcttaccagcctctacaatcttctggaggcttcattggagagcaggattggtatactgtttattacaaatagtgtctgaagacctaagagatgattactgtcagcataagtggagatattacacattgcacctatctcccagcaggaagtttgtttgtttgtttgtttgtttgttttagacagagtctagttctgtcacccaggctggattgcagtggtgcgatctcggctcactgtaaactgcgcctcccgggttcatgccattctcctgcctcagcctcccaaataactgggactacaggcgcctgccaccacgcccggctaattttttatattttttagtagagacggggtttcactgtgttaaccaggatggttttgatctcctgaccttctgatctgcccggttctgcctcccaaattggtgggattacaggcgtgagccactgcgcccggcaggaagtttgtgtttaatgtccctgttgtttcaccaatgtaaaagaaaatggatatttttaaaagaaaagaaaaaagatatcacactgtgtgatgaaatttgtatctatgggtggtcatttgctacttggtaaataattaaagtctgtactggttaactttcctttagcagctgacaacaaataaacatccttacctcccaccttatacactttactccatggttcattgtcagtattattttgtacttctcttgcttcatcatactattgcctggcaaaattccaacccagatttaatcctgcttcccatctatacgctgcctacacctgagagctcaatgttactgttgaaaatgcacactgtggtggcttgtttcagtttaaatgcatgggccgtaacctcactgagccatttattagtaatgactggtaactcctccatatttctctaatccactcactttcgtagtctcctggacaactatgttatagctcctctctcctcaagccttcaacaattatttctcataccctatctctgtgcaaataaccttttttcctatttcactgcaaaaagcccagaagtaatcaaaagtgaatctacatgctcccaccaccacatctactcctcccagtctcagtgaccatatggtttgcctgccttctgttaacagagagcttctatctccacctgacactttatttccctcttgcatattcagggacattagctcagcaattttctttctttctcctttcttgtattatttattttctccctccaccagatcattgcaactgccatataaacacactgaaatatccctgatcgtatttttaaaaatgacacacacttgttaatcctgtgccttccttcagctactaccacatttttctgtccctatttttaacaaaacttactgggagagttttctatactctattgattatgatgggacggcagatggaaactgcttggctgctgtgacaatggctcaccctatcccagttgctacatctagtagcagatcctcaattcttatcttctttgacccatttgatcacccactcttctttacttggtctccacgacactacactttcctgatcttcctcacacctcacaggtccttcttgtcagctccctctgctctttttgctccttaccccaacttctgttagaatgacttaagaagcacaggcctcacacctatttttttttgtacacctctacctctattagcactcctgctcctattttaggaatccaggctttaatgctaacagttacaaattaagccacaagctttgtaagtatttgcctgtgctctagctgctagtgggtttttggaaaatcaatatttgataggcatttgaatacatttgctcttgtggctttaaacaatgtctgtaaaataaaaacttaagaatttacctcctctgaattctagacatttctattcaactacgtagatggcatttccacttgcatgccttaaaggccctcaaccttatctgtactgagttgatcaccccactaactgcctcatccgtcaattatccccattgcagttggtgacattccatcatttggttgcttcggttaaaaaatgttggagttcccccttgactcccttctttctctcatttcctaaagccaattctttggcaaatagtaaccatttctcatgttttcccctgctactgtcctggtccaagccaccatcctcattcacttggattattgcaaaggcctttacctattttatctgcttttatatttgctcatttttctccctccacctctatattttgctctcagcacattatatcatctcatgcgtctactcaaagccttctaatgccttcccttttcataatggcctgtaaggccctttgtgatatggttccctgaaatccttgacttcatttgggcagatgtttctgttacaacactatttatgtgttctgtaaaaccttttgttacacaagatgtactttgaaaaataacagggcttatggtaaaattacgattggaatagagcactcatatcttatacaacataaaaaactatagtactaaccaaagcaataatagataccttgggagataacaggcaggcaggcagctcagattgactgtaggcaattcgaggaatattaaaaatgcataaaaacagtagcatggacatgctgactggggagctgagatgaggcagatgaatggcgctctgagccagagggcctaccactaaggtggtcataggaagaagttcagcctgcattgagcagatagctttgcctggtgggagaggacatatttcttgggagacacctctgggtgcaggcactcatctttagttcccttaagagagctgaaatcactgcagtctgtgcagcagccaacttcagggatttttcctttcctgataaggttataattctgttcttgctattcttgctcctcttgcctaagaaaaatcttgtttccatgttataccaatattatcccactatttaccaatagcatatgagctgcttgctgtcacagaaacacatgccgtaatatgctgtaatagaacagactgtaatccttgggtcatctttgctatttcccatgtgtcaggtgagcacccaccttgtgacttttgctactggtcttttcctacctggaatactctccctccagaaatcttcatagatttcttcatctatgtcagatctttatttaaaaatatttttcatagtttgaacctctctacctagctgatttaaaagaacaccaccaccccaacaacattctctactttacatcatagtttaattttctccgtagtatttatcatctgatatattatattactcatgtattggctgaaccacatccataaatattaagatccgtgagggcaagacttgtgggtttttaaacttgttttcttcctttgtttttctctattatatcttcagtgtctggaacaaggtccagcacatacaaggcatttactaaatgttgagtgaatgaatgaattaagctcaaactccattacagtcctctgggttttttttttttttttttttttttttttttttggggggggggtgtatgtattttgtttttttgtttgttttctgtttttgtgagctgtcatctggcttttttttgttgtttttgttagataataatttgtcttcctttatttactgactttgtttttatgtcttccttaggatgcatcagagtttcatgctgttcacactatacttggggatattcagacatttaaagtcttaatatttcagcaatacattaaaacttctggcctggaaaaatactgtgatacaggttgaatttatctttttgcacccctctgtcatcataaccactccctgctccctcctgttctaggaatccaagctcttatgctaacaattaaaaattaagtccacagactgcaggtaaaccctatgcttgagctactggtgggttgctggaaaattaatatttgatggaaatttgaattaattgtctctttaccccccctaccaatccctgtgtatggtcaaaaaataggacattccaatactccagggtgatggccacagtgctgaggttataaaggagcaggaagatggtaatgaactccctctggtactggacaagggtggtgatgaaaacaatgcgagacgatggactcaggggttctcaaggcagagaatggtgaggggatccaggaatccacatattcaaagacacaaagaagtacagatttctgatgtgttcagggaatggcaactcattagacatgggggcgttggggcacagggtaggcagagaagagagcagtaggtgtatatgacatgaagattttggaatcgatccaactatacagctatcaaaggtttttggtgatacaaccagattcgtcttctcactccttacctctctcacctgatccctctctggcttttccaaactgtcaactataaggctgtgtgaccagagagcatgcccctggccacagtactcagatgagtgcctgacatatatatagagagaaaatcttcttgtttatgtgtctgaacaaactattaatattcatttctgcattttctttacagcaatacttacactgtcttcaaatcctttagggccctgcacctgactatcaggctgcccattggaaactaactttacagactgttcattgattactataatggcatgagtaaccattcagtaacttttttttttttttaactagaattgaaagctttgatccattctctttttctggtgtcatttcccttctgccaggtctgattcatggtgcaacttttggtggcatcacccccaactccagcaacatttttgtccaccctgaggttattactttgatgtcctgaacttatggctctgggggatattttttttaagggatcagagagataaggttgaattagagagattcttagaagtttatgattaaaacactgtcccctctgatctgagtcccagctctgccattgacaggttgtatatcattagcaagctccttcacatttctgaatctcacttgattgagcaaaatttagatctcaaagactactggagatgtgatgctttcacacaaagaaatctacctctttggtgaaatttcaattgtttaggagcaattatttggaagaaaagtgccctctcaccttcttaaatcatctcctagggctataataggaaatatgcagcttttgctgagaacccaaatgacattgtggattatccagctctagtcttctctctcccatatagaggtcggttatctttcccacttcagcagcccaactcagggccatggagaggaaatagatgagatgaagcttaaatatgtcacattagttatttcttagcagctctgataaaagctttagcaggggccgggcgcagtagtgcacgcctgtaattccagcactttgggaggccgaggcagcggatcacctaaggagttcgagaccgcctgaccaacatggagaaaccttgtctctactaaaaatacaaaattaaccaggtgtggtggcacatgcctgtaatcccagctactcaggatgccgaggcaggagaatcacttgaactcaggaggtggaggctgcggtgagccaagatcatgccattgcactccagtctgggcaacgagagcaaaactctgtctcaaaaaaaaaaaaaaaagaaaagaaaaaaaaggttcagcagggtgaggttaaaacttgattaaagaggtctgaggattatctgtgatgttaactcatgtatgttgccttcctctcttcccttctttgttctagggattagttgactttgttctagggattagttgttctaggaatttctagggattagttgactgcaaacattaatgggttaaatataaaaaatcttttctatcctgaaggtccttgaaaaaaatgattttattacttaccggaaaagaaaaataaaacaaagtttacttcacccagaatttatttattttttcttctagtaaaaatgagcaacttctttaaccagaactgaccttgaagacaaatggctaaaataaaacatttgctgaattcactgggcgcatcttacaagtaatttttggattctgcattgactgcctacaagtgccttctgggtacaagtccacagacaagatttgttctgcaaatcttccatgaccaaggtcacctctttggattggcagacccagggagtccatgttgggaagataaattcacacttcatcccttgttgagatctccagccttgctcctctgataactaaccaggtctttcttctgtcttattataatttatgacttttgaaaagtgaattatatctggggttactcaaactctcagctatctataaccatatacagaaatggttctagattctttaaaaaaaagaagctattcagtgatattgggatactctataaccaatataaatggataattcagcacaccaggtgctggggttgagaaatagaggtgaacaattgaggcagggccaaataaagattggaggcaaagacagtgactagatggggatctctgataaggtaatgcacaggcctgtccttggaattctgccacagtggggacattagtgggagcctgtagtcattgcagggtgagaggaggatagaaagaaaagattgtgtgaaggtcagtggaaggtcccccatttcactggtaagagaactatgtatgcaagttttcctgtgtttagtctcacacatgtttggacctttaagaactgatcacgtaatgcatttccctgacagtttttggcatctcagacgaggaagagtgatgggcgacaggtgatggtgacaactattaataagatctgaaagcaaacagtctcatgaaaggtggccaggagagggcagtcaccttttttcaagagtacagactgaatttgcaaagagtacttaggctacaaggctataaagcatgatgcaggcttaagtaaaatgcagtgtcttgagcatagtagaatcttagtgtatgtttgctaaacataccttagctgctgcttttccccagagctcatcagagttccatagaaacctggtcccttccagaaaaccaaagaatgactctaaagaaaagtgattgcaaatccagaaagcagctttgccttattggttggtaacagcagggttttctttcccttgtagtttattttggcttaggctagtgtctctttcatgaagacagctactatttacaattgttgttaacatgtttttccttttcatctcccaatatactctcttcctgtcattaaactcagtcaatttactaatggaatctgctttataagctgctgcattttctttttccacagatgggattaaagccattatgttctatgtcatccaaatagtgttagcttctaggcaccaaggtgttgttccagaggaaaggagaataatggtggacacaggcaggctgagggctaacctaatgatttcatgcatttagtggtaatccttaattaagatcccagttttattttgttggatttagtctgtaacctgctggaaatcattcttgaattaacactgggtggttataaaagcagtaagccaaggagtttgcacttttttcagctgtagctgtttatttagctggagaaaatttagtgggtggtccaaccttcataaccaggaagaatagaatagaggtgtaaaggccttggtggaaggagggcagtagcaacctttccatttcttcagttttatcacagcttataaaattagttcattaggtatgttgatcttgtaggagctagtattttaacatttgccccatgaagttgtttagtttaaatctaagaataaacccactgaaaactattcctaattcacaaaatgaataagaaataatagatgttaatagaaacaaagacttcatttggtttgtttttagagggggcacagaggatgtagtaatataataagttagatttttgttgttttctttgtctttgttctttgtagtcattattatctctaattggtatttgttcctgagttttctcagcgtgcttccacatgggagagataaaagtctcaaagctggtgtacaaaaacccttaataaattgcccattaattagccaccttgatttccacctttaaagcagtttagtgaagtgagagtttgttagatttttctcaagcatagcagaaattaagattaacttcttaggtgtcattgctacttgcctacttaaaccagttcatctttatcataaatatttaagccaaaaatcacattagaggcaatatggcacagtgactgtggactccggagtcaggtgagctggttgaaatcctggcttggctacttcccagctatgtgaccctgggcttcagggttcccttttgcaacatgacatgattgctgagcttctccttagggttgtgtatgactccaataagataatacatgaaaagagctgaaagcagtatctgaccctggagagaaagtagggaagagacaatgaaggaaggaggaaagaggacaaggaagtgggagatagaaagaaaattcaagaaggaaagtggaagaatctcaaatagaaaattaattttcagtttttcctgagaagagatatatagacatgttcatgtggctttggagagccttggagcccatcagcaagaggtttggaaattacattgaaacagaagtgtagacctatgtgacttatgtcctggccagttgcctcatgtcctctgtggtcagattgatctctattggcactgtcaaaggattttttatggacagctggttggggtaaactttgaaacctgattgtttgcacttgagtgccagaatgtgtaattatttactggtgttcactaaggatgtcactgtagctttttagggggagaaagaacttaagtttaaaatttggaggcatctttttcagtctgcctgccctggtgtttgttataacacttagtttggcatgtaacagctgaacctactggttaaatcattaagcatttattattttaaaactcatcttctcaaagcgaaaaataactatcatgttgaagttctttcctctaagaatgacatttactgtgagttttataccaatggactaattgaagggttgagaaaataaattttggaaagacaacaataacttcagaattttccttggatggaggttttctttttaaaacctgaactgagctttatcaaaacagtaactgaactttgaaatgaaacaagagtgctgagttgaaagctccaggaaggcagggatgtgtctgcgttgtttatgactataacctctgggcctaaatcagtacctagcccatagtaagcactcagtaaatgctgaatgaatgagtacggttttaaaattagcatgactgttccttggaaaaaaaataagtcaaaagggaatagcatgcatatgtaactaaatgtttgaaatctcatcacttttttaaggtcaggacctgtttttttctgctccaattaaagaagaaaattgtaatgtaaaagaagcataaagtgaaatatttggtatttatttgttttgacatctgcaataaatttaaaataaatttgtaaatcttattgtattgaaattgtatgagtttcttaagtggtattattcattcagacttaaagtgaagttaggttgctgtcattcatagtggacatttttttttcattattaaaacaacaggtcgtctgggtgttgtcttgtattacagaagcttgcgtgttttctcttgatgctgtgccgtttctattgccattgaggggtctaaggaccaaatgaggtcttattccctttctgatatattcttttggccagtttagaatatgccaggtccattcacatgactaactggctcagttctgtcagttccctcgtcttctcatattagattgttatccatgagcttgaagtttagacataaaaaagaatggttataattctcttccttcactccccctcttccctttttttccttaaagttggccttttgaattcattattctaataattaatattatatattattatataatatagtatatattcataataatgattaatgatagtattaataattgtgtgtgtgtgggcggatactcatacagaggaaaacaatgagattgattggtggaaattacattaatttcataacctcttattaaaagagtttgtgtgtgtgttgttgcttgtttgttccctttgcaactcaaataacatggtcttcttgaggtgcagggaaaacatatgcttaggaaacagagcctccttttccccttttggtatgaagacatatgcaaaaagaatgaaggaactcattgtctctagccagggcgctgtaaaaatagtactggtagagaaaaagctctaagagaagtaaaagtttatagtgctttctcctggcagagttaacctcatcttcatcagcttttcccctgcctcagagaggcagttttggaatgaccaaagcagagtgcgcaagctctctgttcagagttagctagcgtttggatcactgtctctctctgccacagtatgagtggaatattgcatgaccatttctgacttctacattgagcacactcggcctagatgaataaatcctccttgaagaaggtggggcattttggcattcacaagaaaccaagttgatatctgatcctcccactggagaaatgtggcaaagtgagaaagactcactctttgggactctgaaaatataaacacaaataaaaattcaagctgaagaagtcacttgaagtaaaaaaaaaaaaaaaaaaaaaaaagtgttaaactctgttagtcatgtgactttttcttggcattcaaggagccaggaggctcttgtggtctaatctggaaagagtcgctaatcgctgtgtcaccctggcaaattggttgatctccttgtgctggagtgtttagtccagctgctggatgggatgaaagcaagacctcactgaaaccagatgctgtctctctgaaaagatttcagcaataaataatatcatatatactttgttcctggcggcaaatactgaactgttataaccccctgttttcacttgcttctaaatttctgaaaatatctcctttgggcttgaatttttccatgcttttcttcagcccaaaactttttggaaagtttgaccaaaatttcacttagctgtttttcctgaattatgggagaataaaggcattgcattgtttttcagctcataaattctaatttttcccattatacctcagaaaaatagctgagctgctacttttaaagtgtttagaactagtaaaagaatcttggtatggtaaagaatactggcagaagacaaatttaagtctctcagtatttctttctaactctaaacatgaccccacacaaccaggacacacataaaaagctctggtatagttttatagatgaccaaagagaagattctgcaaattctctcagtaactcatcccaagttaccaagaggcaactttagctaccatcagttgcacctttcttaaccacttgctctatgtctgtggatctgatttctaaaaagatgtcatggttatatgctggcattaattgaccctttgtctatattttaattgaagttgaccatttcttttaggtagccttcatgtgtgatgacctcagtcacatctgctgacctagtagactgaaaactcctttacagcaaggcctacgtctgtctccctcaccattgactctgcagtgctcagcagggtatcacgcatgtagtaaaaactgattattgaatcaattaaatgaccataagtacaattgtttttactgcagttttttcattgatttgtccactaagatatgcatgcatgtgttgagtgagtatcactgagtctctactttatgccaggtattggtatgaatgttgtgaatatttctttgctttgatgggtgacacagaagtttggggggattaattaattatacacaacaaaataattatattatttgaatacaattactatgcctatagttggaatattagtccaatctagccaaaaccaatcccagggaatttatcacttactgagcatccatgatgtgcctggccctgtgttaggtactgataagagatcaattagaccagtttatgcagaaagacacacataggttaacagtggcaagacaaatcctaaagtacctattatacaagggaaactataataaagagccaggtgagttgaaagcaggagaggtatcattgtaccacaagatacctcgtgatcttgtgtaaatcccctgaacaatcagaaaaagcgttatggcatagctttatggtcatagatctcatggggacaggcagttcattgcaattccttttatagccgcatccttcactctttaaccctgcactgtatgccattcattctctctgtgctttcagccttggtcaaatgtctcaggactggaaaataaactggaatgacactcaggcacttgatatcaagattactagggtcatgattgtatgtataagaccccaagacctcttgatggttttacaagcatgggtactttttttgtacctatgttttcttcttttgccccaagttcaagagtatgttacagcagcagtataagcatacacaatcaaaggtgattgaagtgaggaagattggctcaatgagctccagccacttcgactctccttctagtccctaacccaccaaactaattgtccccttgcctggaatgtttcaccctcagattttggcatagcaggcttctttttgtcattcagatctcagctcaactgcaagactttctctgacctaaagttacatatgagtcaccccttctggtctccgttgctgtctatcacatcacctactgtgcttcctttatagcatttatctccacctaattgtgtccttctcagtgtttttctttaaactttttattgtcagttttctttcactagatgtcagttccatgaagtaggaaacctttaccaccggtcttgagtgctctggaaagtgtatgtgtgcaataggtgctcaataatgtttacgaaatgatcagctggatgtacatatggcaagtggcaagaagccaagggaataggtcaaaagtcctattgtgctccttgcctgaacaaaacctcttgcaagaatcataggctgttcttgagggtgcctttgccttggattcagcccaaaattctcctatttgttttgtgtgagagttttcctcccatacacagcaatgggcactaagaatgcatatatccagacttttcaagttacaggatggcatctcagatacagtcttcctttggtctatatactatgaagtcataattgcttaagccagtgtctttttcaggatttactccgtacttcttattcgaggcctttcaggtggccactgccctggctttcagatataatttagaatttagcttcggatttgtaaagctattcatgttgcagatcttctctgaaacatttctgtcacgttttggaaagctttacattttcttttgctaatgattttcatctgccaaagagctcatctacttaaaaagcagatcactgaagccacacttggcacatattactttggcttattttctttcgatttttttttgcttttctgggataacttatttatgaagaaagagagaacgctgactttttaatttagaagagaggatattacttgcgttgagagttctagttatataaaatgtatttatctaagttgttaactatatcaaaaatggagcagtcaatgtttggaaatagttcggggtgaaaagattttagcgtgttcacatattctcttagctgtttttaaataattttgcaaagcttatttgcatttcccaaattaacaattttgaccaacaggaaaagctaaagtgttggtttttctcagctcaactttttgggtgtaattaatttataagcaggattttatgaagggagaacagataggacctttctacaaagtccctgagccaaataaacaccccattgttccatagttttgtattgcacataggaaaacatccatccctatcatttttctattaaagggacacagattaccagatttgtaattttaaaaaaggccatttgttgattgagccactttgcgtataaagggtggtatatgttgcctgccaaatttctgtcaacacaagaagaaaaatcatatatcaaaaaaaattttttctcatatcatgtaagaaatttatgcattttagtatgtaccagaagaaatggcataggcattttctgtttttagcagtctattgaaatttcttgattaaagacattttctatttgaaggttaaaatgaccatataaatacagattaattcagttttaatagatgcatcttcctgtcatttaccactttcctccctcaacatcagctgcagtgatcaacatatatttggcagtgaaaccgatatattctgtttatcttcaaatcataagctttttgtttaaatacaacggaatatcttatacctctgattttaatatgacaaatcaaaaagtccacaccaaacccccaactcatcccaaaaaagagattgctatctactcattactgttcactgcttccaagatttgtttcccttggggttactgtttgagaaacttttcttacttccaagattatttttctggttttaagaaagaatctgaactccaagatttttttgtttgtttgttttcagaaagagtctgaaaatctagagattgcttaccttgtggtgaggtggttgtctatgcctctgttcaacaaagtcctcatatactgaatggaaaaaaaaacatcagggcctataattttctaagcattgtgcaagataatagaggagacaaaaatgatgtcttgcttcagaagtcttagatctatttctctttgggggttgaggaatgagaaagattttcagatgaaacaggaagcccaatgaggattatgtggcaatagttcctaaaatgagcaaagagataaatttacttttgtatatgattacaaccaaatcacacactggtgagtttcaaaacagtagttttcatttagaaagcaaattaagtggaataattcaactgagtttcactgcaatgggattcattctagatggttcaactgtggaattagaaacaatatctaaggatgttgctgatagtagtcagctgatgaataccagtgagccatatacaggtatacataattttattgtgctttgctttattgtgttttgtagataattgtgtttttacaaattgaaggtttgttgcaaccctgtgacgagcaagtcttctggctccatttttccaatgacttgtgctcatattgggtctctgtgttacatattggtaatccttgcaatgtttcaaacttttttattattattatatctgttatggtgctctgtgatgagtgacgtttgatgctattattatattgttttagcacactatgaattgcacccatataaggtggggaacttaataactaaatgttgtgtgtgttcttactgctccactaactggctcttcccttatctctctccttctcttctggcttccctatcccttatctctctccttctcttctggcttccttattccctgcaacacaacaatattgaaattaggcccgttattaatgctacagtgacctctacatgtctgatatggtatagttgtgtccgcaaccaaatctcaacttgaattgtatatcccagaatttccatgtgttatgggaagcacccaggggaaggtaattgaatcatgggggccgatctttcccatgctattctcgtgagagtgagtaagtctcactagatctgatgggtttatctcatgagatctgatgggtttatcaggggtttccacttttgcttcttcctcatttttctcttgccaccaccatgtaaaaagggccttttgtccccagccattattctgaggcctcccaagccatgtggaactataagtccaattaaagctctttttattcacagtttcgggtacgtctttatcagcagcatgaaaacaaactaatacggtaaattggtaccagtagagtggagtattgctgaaaagatacccaaaaatgtggaagtgactttggtagtgggtaactggcagaggttggaacagtttggagggctcagaagaagacaggaaaatgtgggaaggtgtggagcttcctagggacttattgaataactttgaccaaacagcctgataacaatatggacaattaagtccagactgaggtggtttcagatggaggtgaggaacttgttgggaactggagaaaaggtgactcttgttatgttttagcaaagaaaccggcagcattttgcccttgccctagagattcgtggaactttgaacttgagagatgatttagggtatctggaggaagaaatttctaaacaacaaagcattcaagaggtgaatgtttgggtgccattaaaagcatttcattgtgaaagggaaacagagcataaaagttcagaaaatttgcagcatggcgatgccatagaaaaggaaaacccgttttttgaggagaaattcaagccggctgcagaaatttgcatgagtagcaaggagcctaatgttgattcccaagaccatggggaaaatgtctccaagccatgtcagagaccttcatggcagccctcccatcacagacccagaggcccagaaggaaaaagtggttttctgggccgggcccagggtccctgtgctgtgtgcagcctaaggacttggtgccttatgtcccagctgctccagctgtggcggaaaagggccaacatagagcttgggctgtggcttcagaggatggaagccccaagccttggcgcttccatatggtattgagcctgcaggtgcacaaaagtcaaaaactgaggtttgggaacctccgcctagatttcagaagatgtatggaaatgcctggatgcccaggcaaaagtttgctgcagggtcggggccctcatgaagaacttgtgctagggcagtgcagaaaggaaatgtggggttagagcccccacacagagtccctgctggggcactgcctggtggagctgtgagaagagggccgctgtcctccagaccccagaatggtagatccaccaacagcttgcactgtgctgcttgaaaagctgcagtcactcaatgccagcccatgaaagcagccaggagggaggctatactcggcaaagccacagggtggacctgcccaagaccatgggaactcacctcttccatcagtttgacctggatgtgagacatggagtcagaggagatcatttttgagctttaaaatttgcctgccctgctagatttcagacttgcatgggccctgtaacccctttgttttggccaatttcttccatttggaacagctgtatttacccaatacctgtactcctgttgtatctaggaagtaactagcttgcttcttattttacaggcttataggcagaagatatttcccttgtctaaagtgagactttggattgtggacttttgggttaatgctgacatgaattaagactctgggggactgctgagaaggcattattgcttttaaaatgtgaagacatgagatttagaggggccagggccagaatgatatgctttgactctgtccctacccaaatctcaactcaaattgtatctcccagaattcccacatgttgtgggagggacccagggggaggtaattgaatcatgggggccagtctttcctgtgctattctcatgatagtgaataagtctcatgagatctgatgagtttatcaggggtgtccgcttttgcttcttccttatttttctcttgccgccaccatgtaagaggacccttttgcctcctgctgtgattcggaggccttcctaatcatgtgggactgtaagtccaattaaacctctttttatttccagttttggatatgtctttatcagcagcatgaaaacaaactaatacagtgtccaagtgaaagggagaatcacaagtctctcagtttaaatcaattaagcttagtgaggaaggcatgttgaaggccaatataggccaaaagccaggcctcttgcaccacagagttttccaagttgtgagtgtaaaggaaaagttcttgaaggaaaataaaagtctactccagtgaatacacaaatgattaaaaaaaaaaaaaaaaaaagaaaagaaaagaaaaggaaagaaaagtgaaacagccttagtgctgatatggagaaagtttgagtggtctggatagaaaatcaaaccagccacaacatttccttaagccaaagcctaatccagagcaaggccctaactctcttcagttttatgtaagctgagagagaaagctacagtagaaatgttggaagctagcagaggttggaagtttaagaagccatctatataataacataaaagtgcaagatgaacctgcaggtgctaatttagaaactgcagaaagttatccagaagatatagctaagatcagtgatgaaggttactaaacaacagattttcagtacagacaaaatagcctattggaagaactaagactttcatagttaaaaaggaaaagtcagtgcttggcttcaagacttcaaaacttcaaagggaaggctgatcctttttttatgggttaatgaagttggtgactttaagttgaagccagttctccccagccttgctagagagacctaaagtcaaattcaggaaatacagagaacctctgcaagattctacacaagaagatcatacccaagacacgtaattatcagattttccaagatgaaaatgaaagaaagaatgttaaaggcagctagagagcaagggcagatcacctacaaaaggaaccccatctggctaacagcagacctctcagctaaaaccctacaagctagaagagatggggggtctatattcaacattcttaaagaaacaaatcttcaaccaagaatttcacatccagccgaactaagtttcctatgtgaaggagaaaaaagattcaaagcaaatattgcgggattttgttactaccagacctcccttataagagatcttgaaaggagcactaaatatagaaaggaaagacagctaccatctaatactaaaacacgcttaaatacacagaccagtgacactataaagcaaccacaaaagcaagctattataataaccagctaacaacacaatgacactaccaggttcacacatatcaacactaaccctgaatgtaaatgggctaaatgcctcacctaaaggcacagagtggcaagctggataaaaaagcaagacctaatggtatcctgtcttcaagagacctatctcacatagccttaaaacaaaggggtggaggaaaatcaaccacgcacatgggaaacaggaaaaagcaggggttgcaatcctaatttcagacaaacagactttaaaccaacaaagatcaaaaaagacaaagaagggcattacataatggtaaagggttcaattcaacaagaagacctaactaccctaaatatatatgtacccaacacaagagcaccgtattcataaggcgaggtcttagatacctacaaagagacatagactcacacacaataatagtgggagacttgaacactccactgacagtattagacagatcatcgaggcaggaaattaacaaagatatttaggaactgaactcaacattggactaaatggatctgatagacctttatagaactctctacctaaaaataacagaacatacattcttctcatcacccacatggcacctactctaagactgatcatataattggaaacaaaacaatcctcagcaaatgcaaaataactgaaatcatacaatttcaaaaatcatagggcccttaagaattatgctaaatctactctgtctatagtctataaatggaacacaatacatgtgtaatagtacacctgtttacattatggcttgctgaatattttaaggccacagttgagacctcctgcacagaaaaagatttttttttttctaaatattagtcctcattgagaatgtacccagtgaccaaggggctctgatggagatgtacaaggaggttaatgttgttttcatgcctgttaacacaatgtccattctgcagcctatggatcaaggagtaattttggtctttaagtcttattacttaagaaatacatttggtaaggctatagctgccatagatagtgattcttctgatggatctaagaaaaatacattaaaaaacttatggaaaggatttaccatccaagataccatttaaaacttttatgattcgtaggaggaggtcaaaatatcaaccttaacagcagtttagaagaagttgattccaattctcatagattactttgaattgattcgagacttcagtggagaaagcagctgcaagtgtagcggaaatagcaagaaaacttgagttagaagtggaacctgaagatgtaactgaattgctacaatctcatgataaaacttgaacagatgaggaattacttcttatggatgagcaaaaaaatagtttcttgagatggaatctactcttggtgaagatgccatgagcactgttgaaatggcgaaagatttagaatatgacataaacttagttgataaagcagcagctagatttgagaagattgattccaattttaaaagaagttctgtgggtaaaatgctgtcaagaagtatcacatactacgcagaaatcttttatgagaggaagaatcaatcaatgtgacaaactttactgttgccttattttaagaaattgccacagccaccccagacttcagcagccacccccatgatcactcagtaggtgtcaacattgagacaagactctccaccagcaaaaagattatgactcactaagggctcagatgatcattagcatttttagcaataaagtatttttaaattaaagtatatatattgtgctttttttagacataaagctcttgcacacttactagactacagcaaattataaacataacttttttttaattttttattttttttgagacagagtcttgctgtgtcacccaggctgtagtgcagtggcgcgatcttgtctcactgcaagctccgcctcccaggttcatgccattctcctgcctcagcctccctggtagctgggactacaggcgcccaccacaacgcctggctaattttttgtatttttagtagaacccgggtttcaccatgttagccaggatggtctcgatctcctgacttcatgattcgcctgccttggcctcgcaaagtgctgggattacaggtgtgagccactgtgcctggccaaacataacttttatatacagtaggaagccaaaaaattgtgtggcttgctttattgggatatttgcttccttacggtggtctggaactgaactgcagtatcttcaaggtatgtctgtattcaagtttatattttcacatacattcttctttacttgttaaaatcatggtcacctcgttattatatgactcattagaatttgcacggttgctttgaccgtataccattgttctacgactacacagatgtctgagtcccaaaggtgaatctgtctggccaattctgaatttaacagcctatataaaaagtagatgttacacaccttgtataacagaagccccctatcatgaacacagcttaactcttgggtgggtcacttagtctgcttggttgagattttagtgcttttcacatctatagaaatgtcctatttgtctaaggcaattttttgaagtaaatttattcttgtcatcctttccgacctgaatatagaggatatataatttttaacattccattattacctaggggatgctcttcagtcattcttccctgaattgattgcactagccctatctttttcacctgaaataagttaaatgtagaattagcactaaagagaaatacgatgaactccttccagaatgggaataggaaatgaaagagagtaaatcagaagtgaatcacttttttttttttttttttttttttttttttttttttttttgctttgcaaatctatattttttccagctttatttaggtatgactggcaaataagagttgtatgtattcaaggtgtatgacatgatgatttgatatatgtgtacattttacagtgatcaccacaatcaaattaatacatccttcaccacacagttaccatttgtgtgtgtgtgtgtgtgtgtgtgtgtgtatgtgtgcaagaggagataagggagtttaatcatttttgaacactagctacaacacaattcaattaaaattctgagaaagaaggaaaattgtcatgcagctgtttaattttagaagcattaactgacaaaatccaagtcttatgaggaatactcagtccaattttcatgaatgaatgggagcccttgcctctgaaattgttgtcatggaagaaatgctaacactgtcttacacaattattcaacttaccaattgaattaaagtaacaagatgagccatggttgtaactgagaatggcaactaaggtcttcttatttaatctgctacctagtttgcctttttgctttagagtggggactatgtttgaattcaaagaataaaagacctttatcctttcaggggagatacaagtaacaagtttaacttttttttttttttttcttaacactgacgcaactcatttggggctgtggaaattgctgctagcattgaaccccttattaacattcaaggtgtgccagttttgcacaagctgtgtcatattcagagacagattgttggcacaaactaaggcacttattctcttgttttttcacctctttcaataagaacagataaatataataaatatactatttctagataagcagttgaaactgctctgctcatctctttggaatacatttgtgcgggatattactgtatgacatgcagaatatataaatatacaaaggaaatgcgcctgcatacattgagatataaatggatgcctattttagaataatatattatttcttaaaagtaaaataagttttggctggtcgcagtggctcatgcctgtaatcccagcactttagaggccgaggtgggtggatcacctgaggtcaagagttcgagaccagcctggccaatatggtgaaaccctatctctactaaaaatacaagaattatccaggcatggtaatgtgcacctgtgattccagctactcagaggatgaggcagggaattgcttgaacccaggtggtggaggttgcagttagctgagatagcaccgttgcactccagcctgggcaacaaagtgagagtccatctcaaaaaaaaaaaaaaaagtaaaataagttttttaagtcactgattctgtttctaaggaattctcagctggggcttctgagttaattctcgatggttagcacttatgagtagcagaaaagaaaactactgtgaattttctctacaatgatttaagacagtgaatggggctttctggcatgtttgcagttaggaactcagatgaccatagattttttttttttagactgggtcttggtcttactatgtcacccaaactggagtgcagtggtgtgatcatagctccctgcagcctcgacctgggctcaagtgatccacagatttttgaagttcaccctggattgttgtgttctatacagaggttctaccttttgctgccttttatggttgctgtattattattttgatgtttcttaaccagctgaatcacattgtagtatatgaaatatgttttggcccttgttttaatggtcatttgctagcagatttcacaatggcccacttaagtaaaatgtaccaacccattcattgctatttgttgcaattcatggtgactaaacatgactccatggtgcagctcaccaaagtcttggtttatgtgtgacttccaggggagagagattgagaaccatctgttaatcattgtgtccctaaactagagtttttcactagagtagttgggcagttgaattagtatgtttctcgtaggctagtgagaaaaacagatttttgggggacattaatcagactctgctggcccagacctctgggaagccttgtgacaagatccagcctgtaaaatatcacatatgatttgcttttcttcttgaaagggacacattgtggcttttctctggaatctgtgaagaaaatgcttctgagcctagaaactggagttgagaaagctcttcctgatcatataacaataagtcttgtgagggtcaccccttgagccatgagggcaggtagaaggaacatggggttgagagtcatggattcagtgattggaactcacttgactaaccagtgtagctctgccacccctcttaggattgttacagtgatatgtgcctacatatagaaagtcatcagaacttctgtttatttttctgtgtaatatttatggacttgttacatttaactctaggcaaaggtatagatttggaggtctttgatgtatatatattatatataatgtattttagcatacaaaggaggctataatacatactcatgtacctgtcacatgaatgaattcatcaaatgtaaacttttttcccaaatctgcttcttagctgttatttataaagaaacaaattatacagaaaaatttgaaggcccccattttaccttccccagtctcattcttttctctgccaccccagagaaaacaactgtcttgcataggtatttatataattctgttttatactttgccacttttactacatatatgaagcatgcttgttacatacatgaacataaaatatacatgttttactgtaagtgtgtaatgtattctagaatttgctactttactaccaaatattttgtttccagaatttaccttgttattatataaccctagttcattttttaaaaaattgccatatattactccatgttatgaaaataccacaatttatttattcccatactaaccagaatttgaattgatacaatttttaattaaaattaatgatgctgaaagaaatgttcttatacatttccctcagggcatacgtgatagagttcttctcacatatatatcagtgtacttgctgtgtcttaggatttgtacaattgcatgtctgttagatacgccaaattgttctgcaaagtactcatacctgtttccactcctaccagcaatgaatgagaactttgtttcccaggtcgttgccaacacttgattattatcagatttaattatttgccagttgatggatatgaattgctctatcattgttttaatattcattactttgattatatataacattgggcatacattttatagggccatttaaatttcctcttatctgaattacttatttctcctcttcattgattcttctattatcttttcttctctttattaatttatagaaatgtgtatatgtgtgatcctaatatatgtcataatacctatgttcatatttcgtatatatgtataaagaaatatttgtctgttatatataggttgaaaagtttgctccctatctgctgattgcattttaattttgttcatgacatcttttaacatacatgatctttaattttgatatagttaatttttttttactctacattttgagaattgcttaagaaatgactttattttgtatagtcatatgctctaaatttttaaatctacttacgatagttttatgttaaatatgtcaacctttgtttcaccgggaatttttttatatgtatggtataaagcataaatcaatttttttactattaagaatgcttttattatattatatcttattttattctatttttatttttccataagttattgaggtacaggtggtatttcgttacttgagtagattctttagcggtgatttgtgagattctggtgtacccatcacccgagcagcatacgctgcaccatatttgttgtcttttatccctcatccccctccctccctttccccaagaccccaaattccattgtatcattcttatgcctttgcatcctcatagcttagcccccacttatcagtgggaacataccatgtttggttttccattcctgagttacttcacttagaataatagtctccaatctcatccaagtcatgccattaattcattcctttctatggttgagtagtattccatcatatatatatgatagaatatatatatgtgtgtgtatatgtatgtgtgtgtgtatatacatgtgtgtttgtgtgtgtgtgtgccaacagacgtcagggtggcaggtactggggggtccctgattcctgctgcttacctttcttgctgccaatggtccttaaaatccaaacatgatgccctctctgtgtgagcaaatttggggaaccaaaggaaatcaagcttgtaaacaagcagtaaattttcccaggcacaatttgtttttgctccccaaaagtacacagatagaaaattttgtgagatcagaccagtttttagtatttatccagcataatcatttggcctaagcaaacatgtaaaggggcttctttttgaggctcaatgaataggccgttaaagtaaacgattccatctctccagaccccgacacgctcaaattcacttgaagagaaacactttttaatgctgaattnnnnnnnnnnnnnnnnnnnnttgagccgaggagtttgaggttgcagcaagatatgattttaccgctgcgccccagcctaaacttcagagcaagactctgtctctaaattaaaaacaaaaccaaaaaattctactacagcatacgttttatggataaattttacaccaccattgaaacaattataatacaatcagtgcattttggaaaaaaagaaaaagaaaaaaggaaaggggaatgattatattatactagtggtagggtattccctaacaccatatatatacacaccagtttctttatccactcgttgattgatgagtgtttgggttggttccatgatttttcaattgcgaattgtgctgctataaacatgtgtgcaagtatctttttcatataatgacttcttttcctctgcgtagatacccagtagtaggattgctgaatcaaatggtagttctactttagttctttaaggaatctccacactcttttccatagtggctgtactagtttacattcccaccagcagtgtataagtgttccctgatcaccgcattcgtgccaacatctacttttattacttttttttattatggccattcttgtagaagcaagatcgtattacattgtggttttgattgcatttcccttatcattagtgatattgagcattttttcacgtatttgttggccatttgtgtatcttcttttgagaattgccttagcccactttttcatgggattgcttgttttttttttcttattgatttgtttgagtttgttgtagattctggatattagtcctgtgtcagatgtgtagattgtgaagattttctcctactctgtgggttgcctgtttactctgctgactgttccttttgctgtgcaaaagctctttagtttaagtcccaactatttatttttgtttttatttcatttgcttttgcattcttggccatgaaatccttgctaagccaatgtctagaagggtattttccaaaaatactacaatattttctagtattttgatagtttcatgttttagatttaagttcttaatccatcctgagtagatttttgcctaaggtaagagatgaggatccagttttattctcctatatgtgactagccaattatccaaacatcatttgttgaaaaggtgtcctttccccactttatgtctttgctttgtctaaaatcagttggttgtaatatttgggtttatttctgggttctctattctgttccattggtctatgtgcctattttcgtaccagtaccatgctgttttcgtgactatggccttatagtacagtttgaaatcaggtagtgtaattcctccagatttgttctttttccttatttcttgctttggctatgcaggctcttttttggtcccataagaattttagaattgttttttctaattatgtgaagaatgatggtggtattttgaagggggtggttttgaatttgtagattgcttttggcagtgtggtcattttcacaatattgattctgcctatccgtgagcatgggatgtgtttccatttgtttggtcatctgtgatttctttcagcagtgttttgtagttttccttgtcgaggtctttcgactcttttgttaggtatattcctaattattttattttttattttttgtttttttggcagcaattgtaaaaggggttgagttcttgatttgattctctgcttggtcactgctggtatatagaagagctactgatttgtgtacattaatcttgtgtctggacattttgctgaattcttttatcagttctgggaactttctggaggagtctttaggtactaaaatctttagggttttcaagttaaacgatcatatcatcagcagacagtgacagtttgacttcctttttaccagtttggatcccctttatttccttctcttgtctgattactctggctaggacttctagtactatgttgaagaggagtggtgagagtgggcatccttatcttgttccagttttcagagggaatgctttcaacttttccccattcagtattatgttggttgtgagtttgccataaatggcttttattacattgaggtatgtctcttgtatgctgattttgctgagagtgttaattataaagggatgctggattttgtcaaatgctgcttctgcatctgttgagatgatcatgcaatttttctttttaattctgtttatgtagagtatcacatttattgacttgcataaaccatctctgagtccctggtatgaaacccacttgatcatggtggattatctttttgatatgttgttggtttcagttaactagtattttgttaaagattttagcatctatgtttatcaaggatattggtctgtagttttcttttttggttatatcctttcctggttttggtgatgctggcttcatagaattgattagggagggttctctctttttctatcttgtggaatagtgtcaaaaggatcagtatcaattcttctttgaatatctggttgaattctgctgtgaatccatcaggtcctgggcctttttttgttggtaatcccttaattaccatttcattctcactgcttgctattggtctgttcaggttatctaatttttcctgatttaagctgggagagttgtattttttcctggaatttatccatctcttctaggttttccagtttatgtgcataaaggtgttcgtagtactcttgaatgatcttttgtatttcagtggtgtcagttatagcatcccccattttgtttcttaatgaagtaatttggattttatctcttctattcttggttaatcttgctaatggtctatcaattttatttatatttttaaataaccagctttttgttttatttatcttttgggttttttttcttttaattttatttagttcttctctgttcttggttatttcctttcttctcctgggtttgggtttggtttgtccttgtttctctagttccttgaggttttaccttagaatgtcagtttgtgttctttcagtctttttgacataggcgttagagctatgaactttcctcttagcaccgcatttgctgtatcccaaaagttttgataggtttgtcattattgttgttcagtccaaataattttttaaacttccatcttgacttcatttttgacccaatactcattcaggagtagcttatttagtttttatgtatttgcatggttttgaaggttccttttggagttggtttccaggtttattcaatgtggtctgagagagtacttgatatagtttcaattttcttaaatttattgaggcttattttatggcttatcatatggtctatcttggagtaagttccatgcactgttgaatagaatgtgtattctgcagttgttggatgaaatgttctgtatatattggttaagtccatttgttccaagtacagtttaaatccattgtttctttattggctttctgtctggatgacctgtctagtgctgtcagtggaatgttgaagtcctcactattattgtgttgctgtctctctcatttcttaggtctattagtaattgttttataaatttggtacctccaggagttaggcacatatatgtttaggattgtgatattttcctgctgcacaaccttttttaccattatataatgtccctctttgtctcttttaactgctgttgctttaaagtttgctttgtctgatataaaaatcactacccctgctggcttttggtgtacatttgcatgaaatgcccttttctaacactttactttaagtttatgtgagtccttgtgtgttaggtgaatctcctgaaggcagcagatacttggttggtgagttcttatctattctgctgttctgtatcttttaagtggagcatttaggtcatttacattcagtgtcagtatgagatgtgtggtactgttgcattcatcgtgctatttgctgcctgtgtaccttgttttttttgtttttggttttggtttttatcttgtatttttgttttataggtcctatgtgatttatgctttaaagaggttctgttttgatgtttccaggatttgtttcaagatttagagctccttttagcagctcttgtagtgccagcttgctaggggccaattctctcagcatttgtttgtctgaaaacaactgtatctttccttcatatgtgatgcttagcttgctggatacaaaatttttggctaataattgttttgtttgaggaggctgaagataagggctcaatcttttctagctcgcagagtttctgctgagaaatctgctgctaatctgataggttttcctttataggttacccagtgcctttgcctctcagctcttagaattctttcttttgtcttaactctagataacctggtaacaatgtgcctaggtgattatttctttgcgatgaatttcccaggtgttctttgtgcttcttgtatttagatatctaggtctctagcaaggctggggaagttttcctcaattattccctcaaatatgttttcccaaacttttagatttctcttcttcctcaggaacaccgattattcttaggtttggtcatttaacataatcccagacttcttggaagctttgttcgtattttctttttttttctttgccttcattgaattgggttaattcaaagaccttgtcttcaagttctgcatttctttcttctacttgttcaattttattgctgagactttccagagcatttttcatttctatgagtttgtccaatgtttcctgaagttttgattgttttttctttatgctatctatttccttgaatatttctcctttcacttcttgtgtcgtttccttgtgtcagatttccttgcattgggtttcacctttctctagtgcctccctgattagcttaataactaacctcctgaattctttttcaggtaaatcagagactttttcttggtttagatccattgttagtggactagtgttactttggggggggggtgttgaagagccttgctttgtcatattaccagagttggttttctggttccttctcatttgggttccttctcatcctgtcagagggaaggtccattgctgaaggctgttgttcagattcttttgtcccacaggatgctcccttaatgtagtactctccctgatttcctatggatgtgattcctgttagctgagctgaagtgattgttatctctcttctgggtctagccacgcaacaagtctacctggctctgagctggtactggggattgtctgcacagagtcctgtgatgtgaaccacctatgggtctctcagccatggatactagcacagtatttggggtgtctcctgcgtcctccaggagccgtccacttccttcagagggtctgtgggtcctctcaggattcctggttcattcttgaagtctagatctattttttaataggctaatcctaaaaccatttactaagtaacattctttttttcattgttctgtaatgcttcctctgttgtaaattaagatcccgtaaatgctttagtctttgctagactttctttttctcctgttgttttaaaattttctctcccaacaagatatcatattgtgtaagtactatatgttcatagtaagcatttttatctggtactgaataatagtgagaatgcttcaaaatttcactttaagtatgctattaggtactgtatagctttttggctgacttatttttgtcaggttaagaaaactgctctctatttctagtttattatattagcctataaataatggtttttctgcacagtagaataatcatttgattcccacttttaaattattaatgcagtagattatattggtagatctgcctggtattaaactatccttacattcttgatctaaagcttatttgaatgggatgtgttactgtattctctctctcgctctctctctctctgtctctgtatctctcttcctcttttcatctctcctcgggaacatcttaaagcatattttggtaaatttgctttttatagttattgattttcagaaatatttctttgagaagttaaaaatgcaaaggttttatttcactttgtttcaaatatagtaattatctacaaacaagaatcgtccattttctacctattgagactcaaaacattcacagaacataaacctacttgtttcaaatatagtcgttatctaagaataaggattgtccattttctacatattgtgaatgaaaacattcaaagaacataaggccaaaatatctctttcttttggttctaacctgtgggaagcctgtcacttttctaaaagtcatgatcaggctgagcttcactccccnnnnnnnnnnnnnnnnnnnnnnnnncttgtttttgttgtctagaattaactttcatcttctgatccacatgaaatttgttccatgttgttttttacaagcaatatctagttgaattacccaccatgttttacttttttctcaccattagttcattcgtctaataaattcttattgcgtgccttgtgttggcctgctattatacatgcctggaaatataggagtcaacaaatgtgtctctgaactcatgtagttgacaatctaattagagaacaaagatgataaacaagtaaacaagtaaatatatatcaaaaataagtgccatggagaaaaaataagtagtataagggttgttatttatctaggttgtcaggcaagggcctgttacagatgtgtgacatttgaatgcatacttgaaggaagtctgggagaaaagtatcccaagtagagggaataccatatactaattgggatcttcaaggaacatcaaagcggccagttttgttggagcaggatgagcaagaagaacgtagcggtaaatggaggcagagatagtgggtgagagtggggttgagaaaaaaatcagataggactttcagacccctgtatatacttggtcatttactctaagtgagacaggatgccatgacagggccctgaaaagaaaaaggggacatgttcttattttagtgagaccaatttgagtgttgggaataaggagattcaaaagcaaaagcaggtaggccattaagaaactgttataataatccagataaatgttggtggcttgggtaagggagataaagatggagatgataagaagtgatcgcattctggatgtaatctgaagacatgtctgagaggattagttgacagagtgttagttatggggtatcagtgaaagaatagaggaaaggcctgagaatctgaaaagatgaaggtgatatgaaatggcctacagtcttgaatgagtagattaggaagtaaaattgaaagtctggttatgggttttataagtttgagatacctataaaacattcaaataaattattaaatagtgaactgggtatatgagcctgtaattcaagaaagaggtctggattaaagttattatttggacaacattgtcctacatatgccattagtgtcatgattccaaatgagataatctagggaataatcatagagaaaaaaggagaggaggataatttctggtgatatttcaatgctaagtggttgggaaaatgaagagaacacagtgaagttgaccaagatgaagtatttactgacatggaagaatcaatgcggaatgttgttcgagatacaaaattaagatagtgtgccaaagaagggggagtgatccgttgtggcaagtgttattcattggttaaataagatgattaagaatttgccgcaatgtggaagtcattggtgactaaagcaaaactattccattggtgtgggggagattaaagcctgatttgaataagtttaagaaattgagcaaagaggaattaaagacaggagaataagacaatttcttcaagaagttttgatttagaggggagcagagaaatgggtcagtaacttcatgggcagtaactgaaataggagaaaaggtcttttcctcttttttaaaaaggagagaattttagtgcacacttaaggtgattcttttcttcctgcaaaatttttcaaaattttattcatgtatatttctattccaatcgtttctggggtacaagtgatttttggttataaggttgaattgtatggtggtggtaaagtctgagattttagttcatccatcacccaggtagtgtacattgcacccaatatacactttttgttttgtccctcagcccccctaccccctcctcagtctccagtgtacattatgcctttgcatacccgtagcttagctcccacttataagcaagaacttcgtggtatttgattttccattcctgagttaattcttttagaataatggcctccagctccatccaagttgctgcaaaatacattatttccttccttttttatggctgagtagtattccatggtgtacatataccaccttttatttatccccttattgtttgatgggcacctaagttgtttctacatctttgcaattgtgaactgtgctgtgataaacatacatgagcaggtatctttttgatataatgacttattttcctttaagttgatacccagtagtgagactgctggattgaatggtagatctgcttttagttctttgagaaatttccatattgttttccatagaggttgtactaatttacatcactaccagcagtgtataagtaatcctttttcactacgtctataccaacatttattgtttgttttgggtttttgtttttgttttcatctttttataatgtccattctggctaggataaggtggcatatcattatggttttaatttgcatttccctcctttacgtattatttaatgagagtcttttggtggtaaagtatcttagttttcatgtgtgctcacatacacatacacagagtctttagtgacaggctagttgggtatcaaattctgaattgattttttttctctaatacttttaaagtttatttttgtcctggcatctgttgttactaaagaaaaatcttccactagtccatttgagttcattagtaggtaatctgcctcttattttaagtacttttaaagatttttctgtatcttgatgccatatgatagatctactttttattatactttacttagtaattactgtggacttttaatctgctaactcaattatttgattttataaaattatcagtaatgaccttttctataactgattctttacagttgaattaaatcctctctttctggaattcccatcatatgtgtgttggagcttctcaatctaccctccaaggctcgtaactgctcttttaaatttttcagtactactgtcttaattaaaaaaaaaaaaaaaaaaaaccaaacctaatattgcagtgtttggcacagaagaagttcaaagtacaactttgcagtgccacgttgaccagctatcctggcattggttattctttaaagttatttttaaggttaatataccttgtcaggcagcaggtctcaaaacctagggaagcttaaaagcctaaaggcagcctggaaaaaatcaagctaattaaaatgctctttcccattttctcttcctcctatgccctcatccctaaagaatagtgatgaagccttccttaaaaagatatgtataaaatagcagaaagaaaaaggggatccagcaaacatgcgaagacatacttagataattcacagtaaatgttccaaataatattcagcctcactaattctcaaataaatgtaaaacaatggcagatcatttttatccattaaattagtggcaataggaggaaaagaacattttgctgacaattgtaacagtgaaattgaaattctcttcttgtctggtttgaatctaaattaggacagtttgaaagcaattgggtcatatctatgaaaaatctcataaacattctacccttccatgtagcaacattgcttctgtgaatcaaccattaggcaataaatggaaataacaaaccaaatttccccccacctcccaagagatgtttattgtaacattactgataatattgaaaaattagaagcagtctatatcagcgacccacccttgttttgactgtcacttaccataagaaaatattaggtctacaacgtaacccaacagccacacccatgagtcaaaaacttccatataaggaaactgttcaatccattctatttatttaaacacgccaataaacaaagctggttttgatccactaaactgatcctaaaacctaggagtaggttatgactcacagtttgaaaagcaccaatctgaatgtcctatgaaaggcatatgatggaatatgaattaaatttgatattcacaattttttattttgtttttgtttgggggtagttggaggggtactatgtttcctcagccagcaaggaagataatgtttccagataactccatataatggggatttactgtaatgataccagctctgttctactatgcccagtcattctcgtgtatctatctctcaatacaccacgggtcctttatggattcttttgtgatgtcttcaagctccctgtccactctcttgcaacttgtccaagctgatagaacctgcctgaatcactcaacatctgatttcaagcattttattttggtcagcctttggtattaggacttcattctcaatctaatcaattaatattagctgagctaggttgatttcatttgaatcaacaaagaattgctaaaagctgcatttcctagaaaatgtggcaatataattggcaggtacttgagagtctctaatgttaaatggaaaaaaaaaatgaaaaataatgaaagagacaactttttatatggagtctgttttcagttttatttggatattttgttagagacaaaaaaggaatcctaatatagtataaaataaatttctacataagcaagtattatgcatttgtaatcagaaaaaatatcaaaattagctctgtggaaaatgatcatcttgcaagcaagtatcatgtacccttcctcttgatttagctcatcttcttgatgtaaatatgaagtgtctgtgactgaaattctgtttgaagcagaaactttcatgtttgtcttacaaataccatctcagagtacgttgctcagtataaaacttattttgggggttgggtacaaaaacctgcaaggatatagtccaggcttcttttcccaaggtccttcactttcctactcttagtgtaaccattattttgtaaaatttgataagacccttaataacttggggtttgggaatttgatttgaagtaacatggctcagagtatcacctattttttattaaaccaaaaaaaaatttctatctgacaaagatgtgcatttatgtgggccttaataattcccccaaataaaactattcataagttctaacagttccaaatacttctggtttcagcacactaataggatttataactgtcttagataaggagcagtatcttctaaagctcatggaaaagccatatcagaatgccatgtgttcaggtacattatcttttctttatgatatcaagaataaaatctcggcttatgtttttacacaagtcttgtgtgattactctttcccattacttgttcaattgagcctgacaaatgaggtgaaaaaatctttctctttcaaggatgaactagaaagacctaggctggctggtcacaaaaccactgactagttggccctttgtctttttataacccctcattgtctgggatccaacatcgtaatgagtctcagacatgttcctcaagtctagatagacctcatccatgtgttcggtgatccagcccgtcagcatccaagccagcagtgtgagaaggggaagtgtaggggatgctcattgccctgaaggatgcatatgccacttccagtcaggtcctgctcgccagaacatagtcatgtgaccacagttagacacaaggttggctgagaaatgcctttcgctaggttctatttctaactgaaaataggaggagtgaaagttgggataactagtaaatatcagttagtccaagtcatggattgtggtattaattccataagcaaggaaagtcatttaaatgttttatgcagagggataccatgatgataattatgtttcaaagcgtgtttctgtgtgtgagagagagagactgaaagagagagtgagataaatggattagagagaatttgtctgggtattaagaggccattctcaaatccaagtgagaaatggtggctagtaacagtagtgaggataaagagggatggaatggactcaaaagatacagaagagataacatcaaaagatgaaacgggtagaggaggaagaaaagacatccaactaactcctaagtttctgatttatactgcaaattctggagatcaggtgtttatggaccactgagtttagttttagaaatgtgctttagaggtatttgtcagataggtggtttctacacattcaaaataagatttcaaaacatattagccacaaattcacaatcagcaaaattctcaaatttggtcattgtcaactaaactattaaaatgaattttcccctctgagtgtttctcatcttaaagggtttgtatgtattacatgtcacagaacggtttattgcatataaacatgggaaagcaagccaggcagaagaagtcttgtaaccagctaaaggcccagctaataaatcatgaacagtcttcttgtattaatagtgtggacaggactgttggtcacacacaggaaaatgagtcacacagtcttgtgtgtacagcaactcactccacactcagtgatgggaatgattgttctaaccgtgtgagtggctacaataattatggcaaagctccagagctagaaagctggtcttttttttttttcagtgtcactcgagtatgtaattcactaaatgtttagtattttataccttttagttgacttgtgagcgctttctaaaagaggtatatttccctctattagaaggtaatcaaaaaaaccctaaactgcattttctaaatgctgtgttcttctgcccaattgaccaaaatatactcagttgattaggactttgaagggttggggtgaggggactaaattaagatgcaggaatttcagttttctaggggttttctagtcaactactttatactgctgacaaatggttaaatgtttacaatgaaactaagtatgctaggatttctaatgagcaatgaaattttagaattcatttactcattaattttttcatttacaagatgtacaatgtgctgtcttctgggcatttgggatactttaatgaggtagcagtgagtacaacggatggtcacttctgcctttgttcttctactctttagagaagggaaaggaccaagattcagataccctatcactgctttcaacccatccacatcagagcctttgttgagttctaatgcttagccctcttctcagctaatttggctgcctccattgtaataggcctcatgagactccagcccaggcctggcctttggttcagcaggcagagcccagagatgtactgggcaaaggtcaggggatttattatatgaggcaatggtcgggtgtgatttaatttactcctctggtaccagatatgtgtgtgtgtgcatgagagagagagattgaggatgattgattttggaggaatttttgtgaaggtttatatatcaaagcagaaagaccaagaagttagagattaatacatgccaagtcgtgaccaagaaacttctgtgggatcccacctccaacccctccctctctgccagattttaaccaaatcagtgtgatgtgatctgcttgcatatatgagtgaaagaaaaaggaaatttaaaaagttcttgatataaagcctggaggaaacaatacgaaaatccagcctctatttcagcaatatctgccggactattggttagtattcccttactgttatttattgtttgattaaaaggctgatagtcagggttttgttttggttttttttttctacttactttcgcattttttagatataaatctttaacgtggctttgaccagatgttttcctttctcctcccacttcattcttccctcttctgggttaatttctctcattgttctctcttccctttacttctctgcccttttcctttctactctaagcgaaacttctattttcgtgtgctggagtttataaagtattcttattaggcaaagaaagcctttggctgccctcctccttgtctggtcaccatcaagatataattttggttttcaaaggttgttctctgaaggaaggactagttttctgagcattgagacagcagatacattttgagaaagtcaacagggatggtaatttgcattaagtaggaaatacttaagggttttaattctgttccatgtgttacatttcaacagtttacattaagaaaagtattgtaggccgggcgcggtggctcaagcctgtaatcccagcactttgggaggccgagacgggtggatcacgaggtcaggagatcgagaccatcctggtgaacacagtgaaaccccgtctctactaaaactacaaaaaaactagccgggcgaggtggcgggcgcctgtagtcccagctactcgggaggctgaggcaggagaatggcgtgaacccgggaggcggagcttgcagtgagctgagatccggccactgcactccagcctgggcgacagagcgagactccgtctcaaaaaaaaaaaaaaaaagaaaagaaaagtattgtaaagaaaagtgatacaacagttgcatgtttattttgtatgtttagtctgagagatggtcagtactttgaaggaaagagaaataaggctttgtctcctgcttcttcttatacctctttgcagattaactctgatgctttgagtgtcttactgcattgcctgattaaaacccatcccataatgcctgatgtgatgggaaacaccacttactctatctcaatggaaagcattcagatgaactttcaacagaaggacatgctcccgcctcttccaaacacctcttttaaaaccgtgtctatgggcctttcttcatgtcttcaacaatttgtttaaaactggttgtgctaggtagtgggcaatataaagatgatcacaggaaagagatgacaatatcactgattccttatagtgctataataagggtttgtcaaggttgtgatagaagtagagaggagaggcacctgacttcacttgggtgtggggtttttgctaaggtgcttctaagttgaagtgtccttgagctgaggtttaggggaatgagtagcaaagatggattaaatgagaagaggataggcggcagcagggccagaggtgtgaatagcctggaaccttctgagaagattcctttgtagacagaagaaaggggagatttgtggaaatgctggaagataaggtaggaagaggccacatcagatcacacatggctggctgtacctctctaaaagtttatgatttgtactggggggtttgaaacagaggctataaattggcagtttaagaaaatcactgtggtgttagtgggaagaatagattttggcaagattctaactaggattattttcaaaaatttacgcccagtttagtccagatgtcagggctagtttggagtaaatttctttctttaattactccagggctcttgtattgcttcagagaaagtagaaaggggaactcaccctcattcagggagggtaggcgagcgaccagccagctggggaaggccaaagagccaggtcaccttgtgcccacacttgttatgatttgtttgtactgtctgctggatgatcaatgatattagctacgacagcacatatgagcccggggtaagtgtgtcttcttgctacttgaagtgcttcttgaaaatagtgacaggctgaagacaacacggaatactgaaaaagcccattggacaggggacaggagacctggtgctgctcccagcttggccagcaccagccccgggggcttagacacattacttcacctctctgggcttaacttacccatttataacatgcaacctttagactaacactgtcctcggggccttgttcagcccctggcttctgtcattgtgattctgcgccccccagggtccccctgggccccatcactactaaccctaggcttctagacatgttgattcatagagaaataggaaagccatttatcttcagtgagtgtaagccagaagtacagttgtgtcttaaggaatctaatctagtgaacatggaaaatacttttctaaggaaaaaaattgtgattggtgttctgtcctgagctgatggcaaaagggaagcaggaaccacttcatacatctcaatccctctgttttttcctttctatcctcttgaatttttcggcctgttcgtctttcaaaagtggagaggagtttgaatggggatgctgaggacactgagggtagccacctatggaagaggcttgactgggaagccgagttctgccacctgacaaaggggcacgtgttcagtgtttatttggcatagcagctgttcaggtggagcccaggcagaattttgacgtcgttgggaccttccatacctttctgaaaatctcttgcaccaacacccggcaccctcaggttatgttctgcttcccaaagttcatccccaggctcaacttctaaccctcttgttttctcttttaccagaactaacttctaaagatccagagacaacaactagatggtggtctggatgttcctgaggtggaaagagaacctctagtgcctctggctgacattgtatccactgacaggtcccctcccacatgcatacatgtaacatgtttctgctcacttatcaaatacagcccatgctttgatgattgaggacagagtggggattataagttgatgcagtaggtctgtgtcttgccctgagaacttcacaaacagcaacacaggcaccaagaactcatcactcatctgttccacccacaggggtttatcatcttgtgacttggatattgtggaatattttatagtaaaggttaaaaaaaatcagtgtaggcacagaggagttaacagctacgttgcagtggggagtatggaaggcttcatggaggtggtgatatttgaacgtgactttgaagggtaggtagagtcctgacttctctgacagtagccttgaaagtaggggaaacttgaccatgaagaaggctgttgaaagtctggagaacagaaaaggtaggggactaagactctaggagaaggtactacattccagagagaatacagaagtataatcctccctcatggtgacaagttaaatgtgagaagggatggactaaccaactgggtgaaccctgatctcattaagcaagataagaaatagaagaaatgaatctgcatgttcattatgtagggatcagaagcaggtaggaaatgccgactttattttagacagaggttattttaggtacctgtgggcatccaggtgtattatttccctatgtctgaagcacatgtcctttggttctttagcattttgatgatgatgctacatgtaaacttccccctagggattttctgtaagttttcttcctcattcgagagtaaagttttaactggtaacatgatcacaagtggttgaaaagttaaaatgctagtcatataacttttcaatgaagggagcatgaatggtttggtactgttttacaagatgtgaaaactgatttcacttaagtagactgtaacataaagtgcttatgtgtctgtccctttgactttctggtaggtgtacagtctctctgaatcaatagtggctcagacttctgatttcaaacctcttcgggcatccaactggtttgggagaaacatagccaggtcattgaattataatttcctgagttatggtgtggtggtcccataggacagtaaacataagcctcctgggaactgaacttttaattcaggaggactgaaaacaagctcttctgagtcaagatttgcaaggacatgtgacaaagatagactggccttcccgcttccacaccatcttttcctccataaatacgtgctccttatttttcttctaccctagtctgttgtagattttgaccttggctgttactttcctaccaacacattgcctgtttttaagtttcctggtttgacctgatgttaagatggaaagcaaggctagcaaactgatggagatagagccttccagcctttctcactttccctgggatcatctcatgttgatttacatgttcaaaaaaattttttaaagaaataaattgtatcagttgctccagaggtgattagactctaggggcctgatttctcttagccaaacttaagacatgggccaatacaccaaaatgtcaatatatttatttgtttcgtattgcactgtcaagcaatttcatttcatctgattattgtgttcattttcctgaaagatagtgatcccagaaaacaagaatcagaaggtcatttgacaactgtggagttgaaatagagggaactaaatgaccttagggcatagcatcatcaagctttgagaaattattgtacctgtctctgtgttgggacattctttttggtcccaggtagttggaggagacaaagctgtaaattatttactagtttttcaacatttccttatcgtttattgttaactgacggaactatattgtctctgaagtcccttatgaataaaattgctagacattgcaaaaatgtccctctcaatattgacatgtttcagtggtgattattatcttcctgattaatgtttacggtcaatctcaagctctataatggactcttaaaggctgtagcagttttctattgcttccataacatattaccacaaactttgtggcttaaacaatacccatttattgtctcacagttctatatgtgagaagtctgggcacaccatggccaaactgggctcttgcttagaatttgcaaggcagaaatcagtgttgttaggacctctagggatgaatttgcttccaagccgattccagttgttttcatgaactgagttccttgccattgttgaactatattcccccatttctttgctggctgtcagctaggagccggtttttgctccttttactcctgtctgcattgcatctcatggtttctgtgtgcccccttccagcaacaagattctatgtaccctcttccagcaacagaagatcaagtccttttcaagtttctaatctctctgacttccccttctgccatatctcattctgcttttacaggctcgggtgattacatcagtttatgcaggtaatccaagataatctccctattttaaagccagtgggttagccatcttaattacatccacaaagttccttcacagcagtacctagattagtgtttgaataacctgggatggtaatcttgcaagggatcttttggcattctgtctatccagtctcatcagcaacactttgaaatattgtcgttacttgagtgatcatttctgtgactggctgatttcatctatacatgtatattatttttatttgccattttgtagggtaatattttctgatcttaattccatatttcagtattaaaattacttgacatagatccataaatcatcatctgttgcaataaagcacattaattggttggtagaatggggagactgatatttcttttctcttcttcttggatgagggcaacttttgggggcagatgagttctgttgtgacaaaagttatatagcacatttggtttgcactgaatcagcgattctcaatcctggccatgctttagaattatacaagaaaaatcttcaagtatcaatactcagtccctaccctactgatccaatttatctatgataaagccagagcattgatttttaagttccccaggtgattctaatatataaccaaggctcagaactactgatatgttccaacattctgttttggagataaagaagttgaggctgaggatgagaacttagtcacataaagtccataactagtgacagacataagttctgtcctacaaaaaaaaattgatggtttaattgtatgtagagttcagtgctcagtaattatgtacaaagtgagtggttgagaagatctggaacaccctacttcttgctttagtaggaagactatttctttctatgactttaaaaaattatcagaccttgcaaaacaacttatgaaggtctcttctcagcagctttggcctgccttgtgagtaataataaacacagatccattttacactagctaggaagctggccgcgtggacttctcctactcctctgtgttccagagcttcatggtacaatgcagtagccactagccacatgtagctattgaacacttgaaatgggactagtttcgattgagatgtttgtgagtgtcaaatgcatactagaatcaaagattcagtatgagaaaaacggtgcaaaatatctcattaatactttttacattgattacatgatgaaataatatttgaatatattgagttaaataagatacattattaaaattaatttatcaattttttaacttttttaatgtagttactagaaaatttacaactatgtatgtggctggcatttgtggctcacattatatttctgttagacagcacttttctagggagtattttctattaaagctattgacaatgaatggtccaagtccaagctattatacctcctttgatcttgaagagtgaaggggtacattataatcttcctggagatgagacatgatattgatctgccctgtgtttgccatctatctggcagccagtcagtctggccaaatagacttctatttttacatagaagcttaaaggaggcaggataatgccccatgtcatggagagagcatactgcatagctcttaagtaatgtacccaaaagtagaccaggtgctattggaggttctaaggcatagcaataaatattacatcccttgagcaatgtaatacagcccttgaagaaactgccatgtctttgacaggccctatgcactgaaaatattatgatgtctacctctctttataattcacatctaaatattactctttttcttgctccctgtagtttgttctgattcactgctaccctgattgtgtgtttagcgtgcctacttcacaatttaagagtcatgggaaagtaaaggcaggccttggagagatcaagcacagttcaaaaccctacccagagatattctgcctgtgtgagcttgggaggagatttacttaacctctctgagctcctctaaacttccattttctcatttgtgaaatgagcatttctcttgcaaggtctgtgtgaagattgtatgaaataagaaggttcctggcacacttatttgttgggtagatattgtggtgaacatctactctgtggcaagcccatggctaattgttagaatgtaatcgtgagtgagacacagctactgcctccagctaaaagaagagaaagacaaggaacctagtaacatcaggacatgaatagtcatcaatgaatggcagttattattacacagcacagtgcaggatttggcttataacaaaaatttggaagggtgttcaggtgagggaattgagacccatagtgattaaatgactacctgtgtcaccagctcaggcaatgttgggctggtgccaggttacgggattgctgactcctcctccagtaatgctttccccaggagatcacattgcctcactcttggtttcccaacttgtttgctttaaaagaataaccttgccatgttggacttgataaaaggaaagaggggtttctcccaatttttgctccatatgttattcgggcatgctagtaactgtctttgaaaacctacacttctgttatgttaactccaaagaaggcagcaacacgtgcacttctttaagatataaaaagcatttagtatactataaattattatagtaatcattgttagattatatctcaccaagataatgaatgttttcatttgaagacttcactgtatgagaacttgtctcctatagcttatttatctccttttagattaggtgaaacagaattttcaaatttgagtctgaagaaaattccaacatctttaaattcgtttaaggagcattccccatggtctatatgatctatcatagtaattaaaaaatcagattttagaatgagccacttgtagaaagagaaaaaaagtagaaaatcaataagaggtttcatttttcaaattctgctttggaaaaaattacttggtagggacaatagtgtaaagtaagatataagaagaaatatatcattcaaataagcggccatgcagttggttatctctttcatgtaacagtcacatctgcattgtgaattcattaatgcaccaagtgaatcaagcttagtgagttgacaaacatccacagggatagttgcggggaggcattgcaaagtgcaatgtgaggtcctagtgaaacagaatgcttcgttctttgagaaagttccactctgaatagaaaaactatgcataccaagatcggagtatggccaagcatttggctactgaaatgccccttcttctttcattcctccataaaggaagagacagagactcaggttcttgtaactcagctgccttttttgagttctcccaagagacgttctaacttcaagccaagcatcttgtcactgggatttctgtatctaatttttagttctagaaatccatgatttcacaaaacaaattatctgaacctaacaacaaccacatagaattttcttaaagtagacgagggaggaattagcccctaaagtatttcctacacaattggaactccctttagaagatgtgcaattgcctgtacacccaagcacaaatgggctgtattattgccttatctaggatatacacactttacattataatggtccttccctttccctgaacccgcatatgatgtaagtgcttgatttaggaatagttacatattgtgactggcgaaaagcacatttgctgattgctctgccacctgcctagatgtatatttatatatcatgaagatatataatttatcttttatgataaattataataaaagataaagatatgtaatatatcttgatatataaatgagggtccctactctcagtataccccgtaggaacattataaaacataaatagtctgttgttactactaccaagaagactttagtaagtgtaataactaacccttttggatacatgcagagcgaatgccaaatgctttaaataaattatcgcatctaatcctgatttttttatgaaaaagggaaaatcttatcatatcaatattagagatgagtaagctgaggtttgatagagctaggattttaacttagctctctgtgactccaaagcacattcacttaaccccaacctcaccctctctgtaaatgaagattaacaatagcatctgtggtagaagctaatgtctcctgatctgggaaagtatctttcaatgattattaactaaatgtgatcagctgccactggatcagatgtcatcaaatgaaattaagtgtccagggtttactcaacagtactgtctcttacgttttgtatcaatgttagtagattgcttaatttttgtacctgttacctcacatgaagcctagatagcatcagtcccttccccagccagtgtgtactgggtccagcttctggcttgtgaatccaatcagtgaattaatgttggtagcttaaaatcagccttgaaagaggtatttacaccacagaaattggcaaatgatacaaatcatgaccctttttttaaattccagagagacaagtgttaaacatttaccagtacaccactgtctgtgactcaaatagggacataatgtgaataattatacttctgaaggtaaatgaatgcacactgggtacccttgaaaaaaacaaccttccacagatacaatcatacctaagtcacctaagtctttagtgaatatttttgtccccatcattctgcttttgggaggaccttttacaacataatcatgatgattttacatgtcttttgaatttttaaaaaattactttatttgttcatttttgttacaaaagcaaatatgcccacagtaatcatttaatgtttttgaatgcaagtgcatacatataaacaataaaatgtatatatgaatgctgccagtagaaataaaatgcaagtcacgtatgtcatttaaaattttcaactacagtcatgcaccacataatgacttttcagtcaatgatggactggccccataaaattataatatcatgtttctatgatatcttttctatgtttagatatgtctagatacataaatacttaatattgtgttaaaattgcttatggtattcagtagagtagtaacctgctgcacaggtctgtagcccagagcaataggctatcccatatagcctaggtgtgtagtaggttataccatctaggtttgtgtaaatacactctgtggtgttcgcagaaccatggaattgcctaatgatgcatttttcagaatgtattcctgtcattaagtgatacatggctgtaatcacatttaaaaaaataagaagaaacagaggattttgttttaataatagatttcatttaactcagcagtcaaaaatatgatttcaacatgttgtcaacataaacattatgaagatgttttgcatcttttcttcttgtactaagctttcaatttcatgtatattttatacttatagcacatatgaatttggacgctaaattttaatcataaatacttgatctgcatttacatttcataaaatgtaaagcttaaaaagtgggttcatatatccaacatgttccaaatagacttacatatttaattaaatttaaattgtcattaaattcctcaattgtgttcgccacattttaagtgctcaatagacacctgtgacttattgtaacagaattggtcagtgcaggtatgtaccatatatccttattttataaaattggagacctaggttggatgtggtggcttatggctataatcccagcactttgggaggccaagacggaaggatcaagtgaggccaggagttagagaccagcctgggcaacatagcaagacgctgttaataaaaaaaaaatagctaggtgggttggcacatgcctgtggtacaagctatttgggaggctgatgaagacggatcccttgagcccaagagttggagactgcagtgagctatgattatgctactgcactcccaacctgggtggcagagtgagacccatgtctcttcaaaaagtaaaaatacaaataatataacaaataaataaataaaattggagacctactatatgtactactcccaaaagtctttttccccctcacaccttacacatttaaaattcccatcctgcattccccactggatctccaagaggagagaaatctcagcaaaagtagttctatcaaaactgtctgtgagctttcctcattcataggaaggaaataaattcacctaaggcattttagatctgaccattttccaaattatcatcaccataaaaagttggtaacaacatgaattctgaaagcaaactatttcaatgcatgcttggtgctaatgaaaaccagcagttttaaatgcccttttgggttaacctcttccttttcctgtgctgtattattggaaaagcttcagcaaggagatcgactagattcaatttcacaatatttcttagtaatcaatgctggcatttactcttcccatctattaatatattaacatcacacttctaaggatgcgtctaaggatgctttaatcacttttaaaaaaatacttgatacaaattagagggtgtccgttattttaggtggtggtttgttttatttccacaaaattacaaaccagatataagcatatttttccctgtgtggcttaataaactttttttttttttgagacagagtctcactctgtcgccaggctggagtgcagtggcgcgatctcggctccctgcaacctccacctccatggttcaagcgattctcctgtctcagtctcccgagtagctgggactacaggtgcacgccaccacacccagctaatttttgtatttttagtagagacgaggtttcaccatgttggccaggagggtctcaatctcttgacctcgtgatccacccgcctcagcctcccaaagtgctgggattacaggcatgaatcaccatgcctggcaaataaacttttaatataattgttgatgaaggtgttatggagacttgtcaccataatagtctagtcttctccttaaattcacgtgatactcctcatctctatgtagctctccctcaccttcagtaatgacctcccttgtctctcaatctttggtctcttaccttcaacttcccactagtcgtttctcacatttccaaaagtcttataattgccttaaaacaccaagtatctgaagcagtcctatgaccttctcctcccgctaaccaactcagatccccaaatcctgatttctttcactagcactatctctcatccacacatacccagttatttgtgacagacgtgtctctaccatctctcatatccaatcatcaccaaatcttgtcaatacttctcagtgatattaagttaagaaggcatgaagggcagctgtaacctaaggaaaacccacttttgcaccaaatctctagtgactttctgatcaatctgagttgaaaatgctgtttttttttgttttttttgtttttttttttttttttgagacagagtctcgctctgtcgcccaggctggagtgcagtggcgtgatcttggctcactgcaagctccgcctcccgggttcacgccattctcctgcctcagcctcccgagtagctgggactacaggcgcccgccacctcgcccggctagttttttgtatcttttagtagagacggggtttcactgtgtcagccaggatggtctcgatctcctgacctcgtgatccgcccgtctcggcctcccaaagtgctgggattacaggcttgagccaccgcgcccggcctgaaaatgctgttttaatctggtcctacctcaccaatctaattttatgcccttttattcgtaaatttgaaccttgttctctattcactagcttcctcagaatatcgtccaaaacatactcagaattcatactcacatccagaacatttgctctgagcttttaccatacaagttgaccatagtttctctcccttttccactcttatctgtcatctagttctaattttaagactgtcaattcgatacctgatttttccctagtctgaccttctattttcagatatgccccttcttttcacagtttcatgtgtttgtactgccttattcttgaagaaccatgattttgattgcttttgcgttaatctccgtagtgccttgctcagtgctagcaggaactagtagtttaacaaatacttgctaattataaattaaagagaattaaacatattggtttctttgtcaggagttggttatagcatgctggaaaatgtattatatctaaccctcatcttttctcatgtgtttacaaattgttttatggccaaagaataagttagtatatcatgggcctaattatgtgattcggaggcctcctctgctgggcagtctacagatttaaaattcatgccagctgcattacactggttttgaacttgctttttcttgagaaagatgggaagcaggcaaaatgcctcaggctttcagggtggaaatggtgtgagttccattatgcaagaatagaagcccattttttatcccgcctgctgaaaatcttgccatgagtctatagtcaaagaatgtgtaagtatcaaaagaaatttagagagggattttccctaggaaaatattgcaagcttaaaaaacccagggagctaaggtccaatttagtagattcctctgaacaatgccatcctctacttagattattatagaacctcttatgacggcatttgagtggactgctgtgtctctgggttaataggtacaagtaataagtttaggtacctgggcaaaaagggtttggtggaggggaatagagggactttctttttctcacatctggcatatcattacattgtaatgttagataacattaaagttccgaacttcatgtgtcagcactctgacctttcctagggacattttatctcggctagaacctaataaagattccctcatctagaaggtgccatgtggggctctgcaaacatggcgtggactgcttacaatacagttgaatgtcacttctcatggcctggctcatgtgaggaccctagagagagttctgcagaggagtgcagagggctacttttggagtcattcccactgagccaacatcagtggaagagaaggggaagagttaggttctaatcaagcacttagcttctgctgaatccatccacatttctttatcctcctcctggcccctggtcttagttagagttgggtccctatgcggtgttccaggaagcagtaaactgcactcacctcctatttgggagcatggcaattttaaatattattttctcctgtaggagtatgcaaacagatttctggttaattttgtgttaaggattcttgtttgttttttgttttgatagagcacattctatggacatatgttcagcttgtaaaggaagtgttataattatagttcctttttttttttttttttttggagactgagtcttgctctgtcgccaggctggagnnnnnnnnnnnnnnnnnnnnnnnnnnnnnnnnnnnnnnnnnnnnnnnnnnnnnnnnnnnnnnnnnnnnnnnnnnnnnnnnnnnnnnnnnnnnnnnnnnnnnnnnnnnnnnnnnnnnnnnnnnnnnnnnnnnnnnnnnnnnnnnnnnnnnnnnnnnnnnnnnnnnnnnnnnnnnnnnnnnnnnnnnnnnnnnnnnnnnnnnnnnnnnnnnnnnnnnnnnnnnnnnnnnnnnnnnnnnnnnnnnnnnnnnnnnnnnnnnnnnnnnnnnnnnnnnnnnnnnnnnnnnnnnnnnnnnttcaaaagtttcgggattggaggaaggtcatcaactattcaactgaagtaaatgccatttatttgtggcatctgccaggtatccttgagatgtctgaagaggtgacttccaaaccagaggatgtggccttctgagaaatgcaaacctgttcacaccctcgctcagatgggaagcaaaaaaggctgcctgggaattggggatttactgttataccctgacatcagaatagcaggtgctactggaaacttctttacctgatactaagtgtcttgggagataacaagtaaaattaacactgtatacagcatccagttcctcagtgttttcttcacttaaaaagaatcagctgggcacggtggctcatacctgtaatcgcagcactttgggaggccaaggcgggtggatcatttgaggtcaggagttagagacaagcctggccaacatggtgaaatcctatctctactaaaaatacaaaaattagctgggcatggtagcacacacctatagtcccagcaacttggaagactgaggcaggagaaccacttaaacctgggaggcagaagttgcagtgagccgagatcatgccactgcactccaggctgggcgacagagtgaaacaaaaaaagaaaaaagaaagaaagaatcaaattcaaagcaaatacttagttaccaacaggattgcatttttagcctataacatctttttttagccttttaatatgtttctgctggaggtttccagctttgattacatagcctgttcacctaggagtaaaggacatggggagggagagatgttcagtggttctcatttggaaagtagataaggatgatgcaaggccatcagctcaaggccttccaggttaggaattaaaaacatggatgttgtaaaaaccacaactcatatttatttgaaatctcaccattgacaaagtgtgttcacctgcatgtttacactcagtcctataaacgactccatgaagcagtgtatggaggagagttcctcatgcatgtgggtttgcacatggggattcagatgcaagaagatacttagtttacatagagatatgttttttattttatgaatataaaattatatggaacaaaaaaagataagtcctctgctgtctagaaattacagtacatcaagaattttatccctatgtagaattacacagccattgccagaggaccacatctgtaggaccatgaaaacaaacatctttgctcattatttcagcctgattagggataccatgaagggctattccattaggtcaggtttgcacagtaataaaaatgatgccagtagaggtcctggtggagctcctagtatgatgataagtgtctgagtaacttgtaaatagtgcaattttatggaaatgttgcagctaagctttaaagtagttggcattagttgttagacacaacaacagctctacaaaaggcaatatgctgagttcatttttgactagcccaaacttgcctcaaaagatccgggatgtggacaccctggtatattttttctagaaaagcttatttccttcctccagataaaggtgtatggtcactgaggtgtgtactgacagatgtgttgatctactctctccgttaaactgaagggctccaggtgtggccacactgggcttctaaatgcctagcaaagccacagatgcatccctcttggtgtctgaggtgttcacattcctgggtctttcagatctgtattcctcatgaaaataaaaactctctacgatacaatctgtccttgtgggtttttagttttactagggagtttttgttttcttttgcttcccgccttctttctgcttcccttctagttaaacctctttaggatggctcattagcactttgttttgagtgtgttgagctgttttgttcactgggaaacagatttatgaaatgttactattaccgtgattgttctgtttttccttttatggcctgtccagctcaaggccccatgcttgctgatactgctgataaggttttctatttccagatcaaattgaagcaaaccttactggccctgttactgaagctgtgcatgggggtcatttgctgtgaggtgtttctatggctttgagccaggatgtgaacatctctagtgttcatgttgtttcctgagacgagtactcacgggcagtagaatttattacaacctgctgtttgagttcatgaaaagtaggacaatatgagactcggggcaatgaaagacttactaggattccttctggaactgattcatcagcacattcatgtcttacccagtctttaaacagtatttcatgataatggtctgcttttatttgctgggctttaccttactctttttgtgattgcaggtcctacaggtatggatctctggcagctgctgttgaccttggcactggcaggatcaagtgatgctttttctggaagtgagcgtgagttctgcttttccatttccaccctcagtggtttgaaacaacactgaattgtatttgttatatccaagttttgtggatgattttattaaaagatgcaagttttacatagcagcaaataggaaacttgacttaactttaaaatcagaaactagtaggacttttccgtggatgtttaggaggaacgcagtagtcagtcaactttggcatctggtgttttcatgtcaaaaattaatgctacaaatcatgctgaggacatttatgttgaagaaaagccaggtctcttgttctcaggctctgggagaaatattgaagttacactgaagagttattagcttactgttcactcagttcatttgtgactaaggatatctagtctatttccagagctcagaattcaggcttgttaatcatattctctgagaaaggaaattgcaggtttcaaatgaatttcacctctcactctctgggtgattaccatttggctaagttgagggaagagacacctgaaatagttgaatgatatacccagaaattatgagcttccttccccatctctataattctccctcccttttttatatccctctcctggtagagaagtctcaatatgtataaactatgtttcatagcagacctaactaaaacaaggaagagtaatggaagggaaagtggagaagaatttttctgtcagaaagaaaactgtgctctctaaagggtggtgggagacctttttttttttttttttttttttttttttttttttttaatgagtacttgatacttttccttgcctgtgcttctacagaagaaagaaacaatgtatttctcccatgctatgacactgaatttagttgttactttaggagtgtctgactccccttctcaccattcagctcatgttggaaaatacagtttaacagcagacttagcgccttaagatgtcctccctgaccttctagccaaaaataaatccgtagtagtgagctgctgagggtgaccagagtcacttagaaaacgagaagagtaaaagatgttattttatctcttaaagcaatttaaaaatatttatagaaaagagtcataattgtttgaaatattttttggtctctctggtgttataatgtcaacattatgcaagtcaaacatggagagaattgcaggctccgtttcagcagcttttcccatggctggttttagaccctggttctgagccaaaaaattgcagctgagatcctctgctgttccaaagtcatggtggcttaatctctcgtttcttcattaaggtgactttcactctactgggcaagatttgaggaatttaaaaaacttgtgaaatgaaaagtatggcataggaaatctttaaagaaaatttaaaatgcatccccagctgagagattagagctcaaattacattttagagctagaaagtctgcacggagcatctgtttccactgcttcgacattttactaaacctttgagttcctgagtgaagagaaaacatcattagttgcttttaatgcttgatttttttctttttaatagttttgtttgattcatttatttgtttagggagagcagaatataagcaaatgcagtggtttatactaaacacaaatcacatatcctaccagtggttacacataggaagtaatttaacaaagaagaacatttttgtctcctttttttttttttttttttttgtcttgttgagctaaccaatatttctttttcctttggaatatgtgcatattccagaatcctttcttaaaatgatctaaagattaaggatggggtatgatgtttatgtaagaaggcatatgtaagctcattccagcatgtgtgtgcatgcttgcctctgtgtgtgtgtgtgtattctagttctggccacttatctaaggggttcttgggttcagccaaagttactgcataacatgacacgggtcagtctcagatgacatttatgggccatgtgtttgtttttctgccaggtctggattgtagccaaatcnnnnnnnnnnnnnnnnnnnngtagacgatgacagacctctatgcatagggaagggtggcacttgagcagggattttcttgtgggcagatgagcaattagaaatatactggccctgaaaggatttttttaaattaaatctaattgccctgtgggaaatttaatgagaactaaatttgaatagtgccattattgtgctagctaaagtgttgtaatagatattttctgtctctcatccttaacatgaagctctcatccttaatatgaagctctatgtctgctcctcaagccaattacatagtcttgaggagaattttttattccaaaatcaggaatgatccacaatgccttgttttcaaagggcttcacatggttgacctgtcaactgattgtatcaaaattgctgctgctggaatgatgttgctagtgagaaatgtgcataaagatctgatggataaaagtattcttccaaggagtgcctgttataaattaggtcgtatatctctactatttcagtcagtcctcccctgaatataccctttgacctcagtaacctaaggtggaagtaggcaagcccctgtcttgtagttcagtctagctaggacatgaggaatgtcttgaaattaatgagagactgtatatctttaaggtttagattgtgtgatgaagagaaatggtcaagatgccctgaaaaagaatagatcaaggtggactagaatagttaattcaacaaattcaatgtactgataattcttaagagtttcctattttcaaagcctgcacctacggctatgaggaatacattgattcttccctcaaggaacttttcatgtgttaatagatcaggcatgtacaccaagaattacaatatcaggcattgtatattaactatcaaaatggcttgaatcacactttatagaagtgatgatgttgggagggatacctcagctgtggtgaattacagcttcatgaaggaggctggcattgtttcaatagagactagaatgtcgggtttaagattttaaaaggctgagaagaacagaaggctattacaggaataacttatgcaataaagcaacaacataaacagaagtgtacaaatgtagatatgagatgtccatggagaacacttcattcacttactgagtgttttttatatatatatacatacacacacacacatatatatatatggcactgtctagtcgatggatggttctgttttagcatttaacattcaacgaatatttcttgagcacttacttcatggaaggcataggattaatttggccagggtgtgtggtacataggtgctatatttgtaattattccccttggaagcaaacttaggtcagtaggtttgagtcaaattatagaaggcctagagatagcaaaggcattatggaaaaggcaagacttgctgggcccttgaagaatcagtagcatttggagaggaagaaaagaaagaggaattgtatgccatatccagcaagtaataggcctcaatgttggaggccagagaaaactgctacctgcaagatggaatagtttgtatgtgtgatatttatatgtaacatatataatacctatgtataatattgatatatatttacatataacatatttatatttgtatgtgtgtaatacatacactatatatgtacatatatacatatatatgtgtatatatgtacaatatatgtatatagtatatatatatatgcatgccagttaggtgtggcttataggcaaagcacataattgacatcactcaaattctgcaaaagttgttatatcattctacacccttcaaggtaagagacttaggaatgaggtgccacatcctaagggaaccgagagccccataatgttttctgtatattttgaacatttttcataaacctatgcacactgacaaaacacttacttgaaagaaaagacactcctgttctcattgctatcagataggaaataatggcacagtggacaaaacaatttattttttaaaataaactctgtcccactacaggtgaagttccacagagccctgagaggatgttaagacatgtcggatatatttcatacaagtattcgagtcatggtttcagttagtaaacagtaatgaatgcatctgttaaatgtgttcaagaatgaacaattcaaggctttccattcacagtgaagatggggagaaaagccacagagcttttgattgctgctgtcttgaccatcatccagaggcaagaagaaatcttatggtgtgttctagtgctatggcctgtgtccatgtacatcagcaatcctctgaccccttgtcctcctgatattgcagactttatttgatgttggagttcagcaggtcacagcaagctgggttaatctagatggtgccaatgtagataatgacacaaaaaaagtctttcaagaagcttttattaagtcattttacagattcaaggaggaattttatgtatgtatttatttattcattcatgcatgcatgcatgcatttattcatctttttcttttagagataggaactcgctatgttgtacaggccccaaacagttctactagcttcacacaatctttcttcagtctgtagagtagctggcattataggtatgagccactgtgcccagtccaaggaagaattttgaatgtatattcctgcctttaaggagctcacagtctttagaagagaaaacagagaaataaacataatttaattgtgatcctcgtaggttattaaagggttttaatctaggtaataatactgttagatttttactttgtcaataatactactaataggatgaaagtaaattcaaaagggatgaattagaggaggaaggtgatgacaataggtcaggagagagataatctaagtgtggcaggggtgataaaaaatagatggatcaccaacacagggatgttagaaagacagagttaccagtactcagagtccaattaacctgtggatatttgacttggggaactatcagtgccttcttttccatccgtttctaagtttctgcatttttaattaatgtgatcatcagcaatgactcacgtttaatgcagtgaagtcctggtgcacagttcagcctattagcactaaagtggtacttgcacagaacagctctgtaggggaggaaacacgctgaggctggatgacagcagagtgtctaagctacgcttcttttgtaccatttctctgaactcctcatgcctgtgtctaccctgggtcccacagctctctgctcagctctgcagtatggctgtgatatagctcaggctactatgcagtgagggtctacagcaaggacaaaggtctgaactccctcctcattgtagtctctggacatttgtgactctatcccgagaccttgacaaccccccaagtattttatcattgctagagtatgtacttaactcatgggatgcaataaaatatatgcaggatgagttgagaacagcaaagccatgtgctgggcagagtctgggaggttggttaggctcccacagaaactgagtgactcacctctacaaagaagctggcagtgtgagtgattagatttatgccacagctaattagtaaattgaaggagtgggaccacccaagaatacttagaaccctgactgttagttaaattcacacatgccagtgatcgaatatatttctggtcttccacattagatgccagctcttatgggaccagagccagtcctggttatataatagaatgtttccacaccagtttggttcagtatcctaaattggggctcttgttatggggtagagaggaatgaggtcgacataatgtatttggtgtttggtgatggcaaagagtacctgttcatagacacacctggttgttcacctctggctagagaccaacccaagttcaactgtagagaagtccattttggtctttactggcccagccagcctctacatgagatcattccctacaacaaggggcccaggattcctcagtcaccccagcaccttttcctgaggaaaaccatctcatgaagaacttgccactgatgattttctcctacctgtgcattgaagtcagtgggtttctaactgagaactggttccttttaaaccttcttaaccttacactgtatatgatataaaactgtaggcagttcagagtcaccaataaagacatcttttggggtctctacttggcttgtaaccacctgcttatccacagtattatgcacctagcttgtcatcaggcagagtcaccagcagccacaacacaagggtccaccttcatctttccgaagcagcaggcagtgtcactccattttgacttttctggcaatactcacacggattgttaaataatgctgtcaacagtgtcatcttcaaacccaaagcaaagcttcctcatcatctgtagttagcagcataaagacggtgatgatgtgtaacataaacacactttgaaatctgatgcaattgaccctacgaagagagtattccttagtgccctgtctggcaactcctggagagaccaagaggccttgggccttagagcacttcttcagcctcagctgcaaatccattttttctagttccttgttcccaggatgaagccacagtgtttcatcagatacatctatcaggaatctctgtttctgtctatataacaatttaacttaagcctcaacctgcacagtgtatgcatcacatttccatggaaggattgcaggtattagaagatgatggatcatgtcttgaccacaggggaaatgtttcaggatgtttttatagaggctttcactaacaagcaggacatgggattggcagagaggtgggggtaggaggcaggtgaagggtggcatttgttgtgtgtccctcttctaaatgaagttataatgacatctgtgtttcaagcgtgtggaaagtttggattgagcttgaaataaatacaatttaattggtttcaaataactgaacaaaatgaccattccatgccctgtgtaataaaatgttatggaattaaaactaactagatgttaaaatccatgaaggatattttgcttgatgcccatccttcagcattctgatgaggatcttcatttatttgttgaattaataagtgaatcagcatctaaatcctgacctttgatttcctcagttctctcctgcaattgtcactgatgctctcatctccagtcctgagcaaggcaggagttgaattagtatccccttatagtgggaggggtctagaaatagctgtgccactttagaagctaggctttgtgggcttttcctggtgatggaatgattttattttcctgctttatactccagttaccaccaagatcagaattctgccctaaacactaatgtgtgagagcctgatgtccttcctaagtcttgtcaacctctttccaggtgactgaactccgaaccccatgcaccagtcaccaacattctgcattaagtgacccggtcacccagcaccatccccctgacaccacctttatctctacaccacctacctgattaaatctcctcaaatattgacagacataatgatgcctgaagatcccaaatccaaattttctttgcccctttggacattgaactttagattacaaaagaccctgactagggatcctgtggatagctgagtcaattttcttagccccattccttaaatatcaagtctttctaattttccaatgagagcacatcttgaagtatgacactctcaagttaaaagtcaatttatattaataaaatccttaatttcttgatttctgaatttgaaaaaatgacactttgtgtatcttttatttttctggcaaaaccttccaaatttgtggaaggagaaataatattgactactggataaccatgtgctatgtgtaaatattaacagatttgccttagtggacactgaattgatgatgtttgccacattatattttacagagccttggctcttccaaaaatgagaggtcatttttcaggggaggaccattttgtgtttggctaacatttaggacatataatttcttctcctctacgtgccactgacccactgcatccctggttggagcaagaagagccatgctttccttaataattgctgatggtgaaacgatgtattgtaataagagcagaggaatagggaaacaggagaaagatagtcagttgaagagtcctgccctgtgtcagggcaccgtttggccagctgggcttgctaggactaaaatatagaaagtacatgaagcttcatactcagacagctctggctacgttgaaaactggtatatcatggtgcccagctttctttgttagctgggccagcatcataccctctagtatttgctctgaacttcataagcatggttgactagctttctcttcctctgcagttgttattcagactgaatagtttctaagaaggcttttattgagaaatagaaggaggtaagttaacttctgtgcatatcttggccatatttgcttgagaaactgatgtgtatactatagccattatgggtgtgaaaggcaaaagtataagtgctctccagtatgacctggctgtcttgtcttacttctatatttgattgctaaaaatatatattcttaggtcaaaaaactcactttaagggaaaaaataaaagaatattaataaccaaaatagaagaatattaagaactttaacatgagacgtatttagattaaaaccatctctttttggattttggggggtgatttctctgtttgggactgggttgctattcacccaaaggtggaaacttttgatgttggggaatgccactgatgccttaaagcagaggataaaaggaaaagactgaaattccaggctaaaagaggagagtgtggccacttagccacaagttagcattcaataaatactgtataaattagagatatatttctgcagttggttgatagaagcttactatgatctgcctcaggatgcatcaaattcctctggtactttgatcctattattgactgtcacttccttgggggcagcagttaatcaagcagaggcttatcctgtcagagagtaaagggagctatgaaggagctcgctgggaggaaaaactggtcctcagagatgcttagggtttaggaccagtaagaggcagtctccacaccacccacatctgattcctgtttccttcttctctgctgtggtccggagaaacagtttagattaggtatttcagagcagtggtgttggactttgtcaaaactgcatttgaatcccatatatgaattgtgtgactttttaaaggttgagttccccagaagtaggatgctgaggcaaggattcctatgaaagtgaattattagaaaatggtccagggagaaagcgataggagagtaggaaatgagactgggaaggtaaagaaaccatcctcaggaggatgcgaatttctacacgctatcagttgtccaagtgcaggtaaaactggctccagcagcctgagagcagccgacacagagacacaggaccagagtgcgggattgaaaccacacatgaagcctgtgtgcaaaaaaaaaaaaaaaaaaaaaaaaaaaaggtaaagaggggctgggcgcggtggctcacacctgtaatcccagcactttggtaggccgaggcaggtggatcacgaggtcaggagttcgagaccagcctgcacaacatgatgaaaccccatctctactaagaatacaaaaattagctgggcagggtgtcgggtgcctgtagtcctagctgctggggaggctgaggcaggggaattgcttgaacccaggaggcagaggttgcagtgagctgaggtggtgccactgcactccagcctggtcaacagagcaagactctgtcttggaaaataaataaaataaaataaaataaaataagacaaaataaataaaataaaataataaaataaagtaaaataggcaaagagatgaatctacatcaccaaagcactgacagcatctgctacagtgactttggtagtttcttacattctctgagcctcagttttcttatctgttaagtcagaggaaaatgacttatttaaaaaggcttcagtgaggtaacacaagtaaagcacctattgagattagtacacaggaaaagcagttactgaatacaattagtcagttggtaattggtaataattatgtataattcctataattataggaagctctatataattattctatataattcctataattggaattaccaataggctaattgtgtttagtaactactgttattgtcctcaagttgagttattattgcaaaccctgaggcctaaataaacatgcaaaataaactgacttgtggaattttatttataacaatatatgtatgcctaaaagaagtggttcatttgcacaaggaagttttagaagctacagataattttaataatgactacagaaaactatcttgaagatgtttctaatgtttaagacatgatagcataaacctttataaaacggaatactgttctatagttatagttgtaagaatcagtgtttagaggatggctttgatgaaattgtactgctctagttcctgtgcttctaataaaattaaatctgattaatacagcaagtaggtctttggtaagttgattctgatgctgggagtgattttcttaattcttgctcagaaagccatccatgagaattaaatgagatagcatgtacaatacctggtatagttactggtaagaggtttttagtaaaggtcagtctcctctttgtttaccttctcatcaagagaggaagaacaaggaaaattaggttgcttttttgagaaaatgctttatgccaattacaattatctgaaagtagaataaatttctaggttaggcaagactagagttaaaacgtgggtgtgcagagctgacctgccagggtactctatacggaagtacatggaaatgtatgtgcaaatacagtttcatataattgttttgatcatacacagtttccacatcagattatatttgaatgactaattcagcaaatataaaaaaggcagaaaaccagtggacaagatgattcctaaggttcctttcttcctggtctatgccctagtgtattatttgaattgatattcggtggaacacagagttactgctggagattgagttataaaaagattcaaatgggttactccattatatctacttaggaaatctttttttaaaataactgatagatgttcagtttgagaagcaaaaggtatttctggccatccctttatagttgtgtacatgactgcagagccatcatttcatgcttacttccccacattcatgtaccattttctcaaaggaaaatgattgaattaacttgctagttttgattctggggtttgttttaagcaactgatatttaaatccacctagtcctctttagctgttctcctagaaactttaatattaagaaacagctgaacttacacattttgtaaaagagttcagacaatgaattccttcttcttgaaatgcatagaagtacccaggtgctagctatacccaagagccttttctaaatacaaaaaggattgacaaaccaagcattcatcctggctgggtccaacagttaggaatcaaaccatgaacttgctattcctctgtttgtggttaacttgtttgtatatttttgaggaagatgattcaatgcaagaagtagttttatatagtacattaagtaaatttcctataggatatacttaatcagaaaaatatttttggactagagctcacagaacatatgtttacaatagttttcagaaagtgaggggctaaatgaggatttctcaaccttggcactattgagattttaggttagataatttttctatggtgggaggtgtgtcctgtgcattgtagcaaatttatcagcatttgtgacctcatacccactagataccagtagcccccttctcagttgcaacaaccaaaacaactatagacattgcaaagtgtcctctagggatcaaaatggctcctgcttgagaaccacagtctagatctggtagttgcatattgaactgacagtccccagaattgttgtggggatcaaattagataaaactcgtttatgctttttaaaaagtaaaacaaatacatatagttacattatacctcttcttttcatttgttagtcatctaagattttttgagcccgatgatggaacccataaataaattaaccttaagaggctcaaaggtttgccaggtaaacaaagaggttagaagaaaaagagagatcatatcagatgtgccttaatgaatgtctgtatgtaacacgtacaaaaagttatgggaaccccaagaaaggaaaggctctttttgaatgaaatcagagaaaaccaactggaccacacagttgaagctccataataagaattaccaagtaactaattgtaactaaatactctttcatacaatgtcatatatccatgcagtttttaaatctagaagtagttaaggttcatgattatcatttctcagggacactactaaagtggtatcaaatctaaatgagcaaattaagaactgaagttgttacagacagctgttaattccctttttcatacctgctccaatgatagccaacaatcaaacaaaaatagtaaaataaaaacgaaagcaaaaaatccaactcagatttcactaagtacagcaataaatatcagagacattagggaataataataggtcaaagcagaaattcattcctcagtatgttcttcaagtggaaaaattaggtctgttttagttctgttgattctaaaagaaacactcagactatcaagaaaacctgttttaaactctaaatctgacactgtagatagatagatagatagatagatagatagatagatagatagatagatagatagatagacagatagatagatagatagaattctgcctaagtaattatctgctggtaccaaagagattgacgaagagattcactaacctaccagaatttcccaaccttgttccgggttattctacattaaatattcattaacaaggaaattccacataaaagctggtgtgcttgatggagccatatttacatgaaaggttgcagcaatttcttctttaaacctcctctacaatttgaccaattccatgttccagggagtactcagaggttgattaggacatgatttgttagcttagcgtgtgctgtactaatggttatgagtcacatttgttttggaagatcacccttaaagcctgtcactcatgcttgtttatgggaaacgcaacaacttaaacatcagctaacaaatccccatgaatgcatggtcatatttgagtgcttctaacaaatgcttcctttcatttctcccttgacagccctaagaattaaagactagtggagcaaactgggagacatccatgaacatttattaaaggaagcataggagagtgtgataactgcaaagccagctgttgatattaatattattggtgtgagattaaatttcatcagtcttaaaacctactttttaccaccagaaaaatcaatctgccatatttaaggttacattaatgtggaacattccacatactgaactgtcacatgcctttaaaataaccatgccttgctgggtttttttttttttttttttttttaatcattacaagtgaaacaaacagctgacaggtggagatctattggtatattcaagtttttcatgtgaaaatatcccccaacattatttgtaatcccaacttgattatgagaaacaaacataccatatacaggcagaagtatgtatcagtagcctttatatttggcacctcactataaaatccatattatgtttcagtgaacatatttatgtcttatacctgagtttctggttgccttcagctttcctcacttgaaaaaaactatacttaaaaaactataatttaatattaaagttaattaacacagcaaatatttattgaggacctattatctaccgggtactattctcagtgcttgcaatgcctcaatgaacaaaagagataaaaacctctacggtcatgctgctttctttagtgagatatgtgtgtgtttgtggagtggaggacatgcatatgaggcagacaatagactacaaaaataatatattatctagtattttataagacagaaagagctatggaaaactgccccatttgttcctcatctgagtatacccaaaagttgatcttgaatatttcatatgaatctcctaggttctaaatgttagaaactaattaaaaataatttgaaactaaactaaatatctttgtgatctctctggctagaagcctcaggaccagccctcactgtttactgatgaggaagctgaggcccagagaattaaatgatgtagccaagatttcaagcacttactgtcagaggtaggaccaagacatacaaccttcttctctggtgtgcttttctcaattggttaacatttaacagcaagtgctttggttgataaaatttatttgaaaatctgtttgaaacaggacaaaataagaaatacctgcttattccctcactgcagagttgtcatcagcagaaagaagattttgaagtgtatgaattatgttcagacaagacccttataaaatcactctcctctctccagtggcagaagtgtggcccctgactcctcacccatcctcattcatctttcatatttcttgaaaatcaccactgagtattttccttctgcttcctgcagcaccagcagaaaagatgaggatgggtctcttgattgccatcacaaatctctttcttattcttgcttccattcttattctgcacatatcttggacttggccatcattcttagagctccactaaattatttgattaaaagattgtttataagtccagagttagaacggaattgaaaaggcactgcacattatgatggagaggaataaactccagtcaaaagtcatggcttctggactcaccaccctaaggcagcctcactggaacttggttttccaaatgtcagtggggttttagaattttcctacttgcaagcttgttgtgaggattaaacggttgagagagattgtgtctgttatggaattgtgaaaactgtaagttgcagtccacactataaaaatcttagttacctctgtcctttctctaaagacaggttgctagtggaatagacaagtttgccattattttgaaggttgtattacgcacatattatgttagtgaagttggtcgtctaaaagttggaagggacctcagaggtcctatattagaccaactgcggttattccttagaataagctgggagttttctgaaaaatacaaattctgaagcctcatacatagagattctgatgtggaagatctggaattgatggcagcagctgcccatctggagctgctgctgtgaagatgccagctatagtgggggaggtgcggctggggctgtgccctccacagagtgccaggtgggaaacctgcccccttctgagttggcaggtctgaagcccagtgctcttcaggcacggttgcagctgcccatctatggctccagacctgggcatccctgcgctctcgggagcgcaggaagcaccccctgctcctgcaggcttggaagtgcctgctgtcactccctggcctctccctgctcctgcacccagcacccgctctggagtgaagcaaagtcgtggccaagcctggatgctgtcatgacctggacaggtgtgcacacactcggggcagtgctgacacaccagtcccctggcacattagcactctctggactttggacaccagccagcatgggagggagactgagggggcactgaggggtggttcagtgcaggcctgcaggcgttccttggcatgaacagcctgggtgatgtggatgacatgtagatggtggcaggaagcagacaggctcctgggcagaaagaggccagtccccagtgaagctccaccttcaagccagggatggccggaagctgggtggccgagctatcagttccaggtggagtccttggcctagagtgagaacttgtgctttttccaggtctgcccatagccacccatggaccaataagcacacacttcctcccttctgatctcataaaatccctggacttattgagactcaggcagatgtcgggatgacctgcctatggataggagctacccactttaggtctcctgagaactgtactgtcactcagtaaagtacttcttcaccttactcaccttccagttgtctgcgtatctcattcttcctggatgtgggacaagaactcaggacccacttaatagcaggactgaaagaactgtaacacaaacagggctgagacatgccttccctgcccaccacattgtgggtgacaagaagagaagaactgcagccctttggggagcccagacctgtgtgacaccctctttgggggctctgcggtttctggcatctccaagctcccaggcctcatcacattcccctcgtccagatgcagtcgcccacagtggaagccatttgtggtgtatcagatgcagccgcaggcttgcatggagctggtgcctgtgctggtgcctggagctgctccatgcaattgcaccttgataattgctattgccaagcatcgacagccccaccatggcagctggtgtacctggctgtacacagtggccggaccccatgcttacccactcacgcatccctcattgctcctcacctggcttgcccttggcaggcatagggtccaggctggtagcacaaaccaagcatagcctaccaggccattggcagaacaagcccagtgggcccaagaaaaacttggtcaaaggtgctaccagccacagaaaggaaacacaaaggtttctggctggaaaagcaacacctgaagaatcctgcaacagaatgatgctctggagtgttttctgtgttaggtgtgcttgtttgtttgacaaaagctccaaacgtgagtctgaagattagccagtttgggaagccttgcttcagctttctactgacattaaactccttctcctctcccatttctgtcttcacttagaaatggaaacccactaattactcaaaatctcaccttttccattcagtcacctaggcccttgcaccctcattactttgccttccaccttgacaattgctattgccaagcatcgacattaatctattttgacatcttctttccacctgctgccctctagtggaagtgcgacaagcagcaaaatatttaactgggaacagcagggaagtgaccagtttgagctggccagttcacacaagtcagcgcaggtccccagcatgatgtctacagaccatggctatgccagaaatcgttaagatggcctcaagctgtttggacgctatttgcacacaagttacatttagagcagaactttgtaaagaccctggcatttgttcatgggctttttaaaggtttcaaaaatctatctggaaaagattacctttgggatatttttgtttctttgtccctcattttcttcttttgtcatttacccaaattcttcttcttgcaaaagaaggtggtcctttcctgccttccctgacctttgaattgtccaaatcttgcaaaaaataaagatatatatatattttttttaaaaaaaattcttccagtttagaaccttccagtcaccaggtgaaaggtattcacatgaactgaacattgacaatgtaaaggacactgtattctcctagcattcctccaggtctctttgaggtccgttagtagtcttcttttttccaggaggcattgaagttaagagagtttaagaagattgtagtatgtcacaaaacaagtggaaaagctagcactaggtctggctgatggaaaatccttacgtatttttttaatgtgcttgtttggtgtttagcacattttttaatgtgcttgtttggtgtttgattatttagtcttctatgaagtaataaataataacttccatggtaaatgttattaaggctcatggtactatatagcaaaaatcattcagcttttttttaatgaatgtttaataatcagtgtgtctctgcataatctccaattactccttttagcagaggaacatggcagggatgggggtaagtttgggtaggaggaaaagacagcaaaagccacagcactgaagcaaagttgagaccagatttcacaaggcagatgccatatactccctcaagctttgaagaaactaaatagttatctatgctaaccaacagggtaggactcgtactccaaaaactgatgtaaaccgtgtgtgtgtgttgtgtgtgtatgtgtgtgtcttttctgcacaattattaaccctttttgtgtagtggtttttcatagttttatccttgattgttaatatcatggtaagtgatttgttataaatatatttttccttaagtatcataaacaatgtaagatttcatttggctgatttttcttttcttaatattgcatatcattattgttagaatacgcatacagattattcaacttcttaactagaatgtacacacacatgtgcacgtacagaactgccttccatctctttgatggtagaaaatatagctctctatagtaagaaaatttactttgagtctcagacataccctttattctctgcatgactgctcggaaagagtaatacttaggatctggattccagttccctctcctctgaccattttaaaacgttgttaccttggccaggtaaatacacttctatgaacttcaatcgtgcctcaattgagcaggctagtccaaggctagtccttggactagttcagctataggagctgaaccttgatttgtggcatagttgaagcccctgaatagtcagatgaaaatcatattaattaaaattaaatagttattggttggatctggtttttcactggcctgcatgaatgatgttttgccttcctttctgatactcagctcagaggctttcttcaattgggttttctttcttgtagtttctctggttcatgaatagcctatagacaaacactatacggttacaggtaaaaggaccctagactaagtcttttattaaacaaatagtcctgtgtaaataatgacatcttattttatgtgtgtgagttttagttttagggtgtagggcatgtctgacatagctaaaggctgagctccaggcagccagctgctatccaatctccacatctggaatgttccaaaaaacctcctatgttttctttctgcagctaagctctgatgagcaagatttaagaagtgcagccacacacttttggctgcacatttttaaagtttgttattgtcgtcatagattacttgttttgaatcaaaactttttaaagaaaacttaatctcccaaattttaaccctcttgaagtttcaggattcctaggaatacttttattttaagatgcataaaatactcagtacatgtacaaaggtaatgcttataagaaacttggggaaaaaataggggagctagtaagattgagaaggggaagaatatctgagctaacattactaacctggcgactattataggtggctggatagcatggaggcataaagccaaacactgttaagagaatagactggatttgaatcctggctctacctggattcgttttgtgacctcagagaagttgcttcccttctctgtgcctcagtttcttcatatgtaaaaggagataactatagtgtctagcatacagaattattgtgaggattaaataagttaatacatataaagaaagttcaaaactatggcgcacaaatgcttaatatatgtaagatattactgttataaaactaaagaaagagaacccagaagacattcagtttggtgggattcagatatgtgttttcctttcctcctcctcctcctcttctgccatctctaaccccactatgcttgccttccaatctatccctgcctcctatttctcttcctccctgtcgctaaaaatatttagaagaaaagaagaggtgcatacttcacggggtgccaagcttttgggtaaagtacacttttcagctaacatgactgtatccaacagtaatgggctttatggtaagagaaagctttttttccaataagtgggttttagctttttaatggatcattctctttgtatgggtaattcttctggaagatggaaattggctctatgataagatagaagagttggactcaggcatctagattaagggagtatcatgtatgcttttaggagagaagtttaatctgcaaaacctacttgccttatttaattaattgttgctcttagctgctcaattttgtacaggtgacttgcatgaaagcaaaatatatgtcaaaatccaaaagcagagtgaagccttgggacttcagtgctttcgggtgtctttccagacctctgctcttcccccaccctcaccaaggccccactgacctcaaagggcccttcttgccaggccatgaattacatctgagccagagggctgggactacagccaaagccaaatgaaggtgcagaattgaggactaaaaaaagcctgagcacgtggtactgggtatagcagataaatttgttggagaaatggtttataaataacatgaaaaggggaaggggacagagggtcacaatattgagttgttgagagttgttcgatatttgaggtcagtctcaccatttttagtaacccaaaagtaatactgaagaaaaaaagctccctgaataaaattaaccacagctgggcttattttttcttatcaagacatttgtaagtttggcagcaagcatttttaaacaggatctcttttatatgaaataaatttaaaaacatgtgtctgcagtcaggacaaacaagtgaacaaaagcaaagcaaaagcgaaaaagaagccccatgaaggcattatgcttttctgagtacagtataaggctaggatactgcagaaactgaaatacttagggatcttattgaaatagttttcttttcctccaaacaaagcaaccatctcagagggatagatgggctaaaagacaaggaataaagtaaacagaagattgataacttgggaggttttcttttcccctttctctatttggttttgatttgcttttccctcattaaaaccagaaaggataaattttggtccagaactcccaagaccagaggtcagggaaagccagcctgaggctggaagctatgaacttatcgctagtctaaactccacctccttcttccctgggagtcctgcacaaatataactgcctgatctttctgtttagtggcaaaggttttgctcccttctctttcatatgggaatattaatttgggaaagatttgcctttttttttttttttttaaagaaacagagacttgacttattcctcccacaaactctttccctggcacagggagaccacaaactaagtgaaaaacaacgtaagaagcttagacaaataggaccatatgccctcccctggagctgaaacatgcatgctccctgtccaccatcacctcgtcttcctatgcttctaccccacccctgtctcttccacactctgggtcacatgtctaccccttactgtgacttataatcacccaggaagggtaacacattgactgagggccaagcttctgataagtgaatgaacatgtcttttctccttgccagatatctatctttgccagagagggctgagtcagggagactaaggttttcaatgtcaaattgtgtattgtttaaaattgtgataatttgctttctgcactgaatctcattttcaaaataaaattatgccttaagtcagatcatactgatgcagattctgcaagtgttaagaggcttctgtgattgcatttgccagctgcaggtcaggcagtggtggatagtggtaagaagtaacctatacttttggctgggagctgtgactcacacctgtaatcccagcgctttaggaggctgaggcgggcagatcacgagatcaggagattgagaccatcctggctaacacaatgaaaccctgtctctactaaaaatacaaacaaattagccaggcttggtggcacatgcctatagtcccagctactcgggaggctgaagcaggagaatcgcttgaacctgggaggcggaggttgcagagccgagatcgcgccactgcaccccacactccaggctgggtaacaaagcaaaactccatctcaaaaaaaaaaaaaaaaaaaaaaaaaatgtaacctatacttttgcagtagaattttgaaagttcaaattcaaactcaggctttgtattttttccaaagtaaattgtattttgttcattttaatccattggttgaatctaatgagatctctctgactggaaattctgccctttttttcctccataactgacttaccagttatctctcatccatgtattttgataaatccataagaatgtctgtttttgttgtctaccaaagcctttataacaaaaccaaattcatagctttgtcaactgcacttgaaaattatgccccaggcttttcaagattctgtaattaacttcttgagtcatttgtttaaccattggtgaattcatttatctttactcgggccacagtaatgtattttacttacaacatattatgagaaactacatcacctgcttcactgaaattgaaaaacgttagatgaacaacactgccctaaaccacatttcaataatcctttgatgaaaagaaagtgagtacatttcctataatgatttgttcttagtgaagccatgttggcttcaagtgacctgttgtttcctttcagggcttacggaaataatctaaccattctaaaatattgatggggatttgggtcaaaggtatagttttaaaaattcaccatctttaacctgttaaatatccaaagaaataatcatttattatttcatttatgctttcagtatctaggacataattaatctaatattgaacatttgaacttattgttagctttgaaaatatgccctattcctattggctttatactcaagttttcttaatacattccctcaatcgtctccagtcttgttattgcccttgcccaagaagaagaaaattctgtaagagctttcttttgccttcctttcttctctgagtggaataatcttttttgttgtttttatagtattttagagtttcgcgagatcagacaaaaattacctcagcttatagctttatcttttaagtggaagaactctgaactattattgtgtcgtcttgaaaaaatagtctatggaatatatataggtagttgtgttattttttgcagtgttaagttcacctttttcttctttttcttttagtgcattgtgaacatttaaaaggtcatttgtgcagcatataagaggattgacaggtttccatgcatgatgcttaatgtggaggtgatttctttccatcaagttattaggtttggaataagtaacacatcttaaaattacaatcttgatgtagcaaatcatcaggtgggttaccattacatggaaagacccagtaaaataaagaccattaagttccggaccctaggagtctacagtaagtcattgggaagttggagaggagaaaggcaacgttagctaggcatttcattcattcctccataaatgcttactgggagcacgttgtgtccctggcatcatcctagcttcactgaaaagaatgacagatatataaaatgagtaagtgagaagtaattgctctttactctcaattatagctgggcaagtgcatctataaatatgcttttgtgttctgaacacacactaagcagttggtcaaagtagtaagctagagaaaactactttcaaatgtagtctttcaaaataaaaaaataataataataataaagatttcaggacagtttacctatgaccatttagagatttaaggattaaaatcaggagagaaggggaatgtttctgctggggaaagatttttaaactggtgttttctactcagctactcaaagtgattttttaaaattttcttccttctattacttattggcctttattgtggggaagactgctctgttggcaacatgagagagatgtgaatcaagaaaatggaaacaccattcaatattcaaaagccactatccccctaaaagcaaccacatactcagattgcacactaactggaggatgttaaaaagtgttctgttaaaaccagttatccagtttttgctacttaaactctgctgtgagaaatgtgactatagagcagccttaaaaagagatcatcttgatattaagcagtgttactcatacatgcttattgacattctaacaggtgactttgaatggatcttcaggctcagaaacatggttgtgtgcctagaactggtgactggaacaaggtgtacagaagtgaaatgaccacttgctttctctattggatttctttatccagctgtgcatgtgtttcagggactacagttgattttcttgatgcaagcctagcaacttgtttttccgttcaacacagtaaaatctgagcaggagagaactccctgttggccacccacctcacaatctttaaaagggaactctgtacagaagcattccacattaggcaaatgtacacttctgcaatcaaaatgaaaaacacttgagctgaatcgttttccgttagctttcgtttccagccctgattaaaaagaatgcagggaaccctgcaagtttaagcagttttggcaggcgaggaaacagctgtgacattgtcaagggttgtctgtaggagctgtgcaggctgctgacagtactgataatgcccagaaatggggcagacgcttttcacatttggtcatcaaaggggtggcagcagctaggttcaaaaagtgaacttttgaccctgtctgagacaactggctctcatgaatcttgttctgtcattctccagtctgattttctctttcagagcaagcgggtaggatctttggttttaagactgattgactgttattaaaagtagctagttcttatagctgcaattggaaaggatggaaggtgaggaagaagagctggtatttcccactatcctgcaggagtggggaaatctatcaatgactgttccactaatctgtggatgagctatctagggagttatcatgcagttgccaaagttttcagcatctaaaagcctccaaagttctctctgtgaggttccacctcccctctctccagacccttcccatgcccctcagattcagcacttgtccactgtccttgctaccagggaatccctctgcagccccctcaccctcctgcccctcccaaaagagttccagactttgacctgtcccttccacctcaacatctgtttgtgtcctaaactgatggccattgaaagaaacagataaactaattaatgctgaggtatgactaattaagtattatcaatgtgctaactctctcagggttatgtgcattttaatagaggaccagcagtccaaaggccggtctcactccactgtgcccctctatcagcacggagtctattgccaggcagccagtgaccaagcctgagaacttgccccagatcagcagcctccccactgagaaagcaagcaaactcaacagtttttcagtgtttcagggaggctgcagcagcaatccagttccttcaaagggtctgtggattctctcagctttcctagtatgttgctgtggtagttagttcttggagcagaagttcacaatgtgaatcttcacatgctgctctgtgtgccgagcgggtgttgtaagttaattctgcccctatctgccatcttaatcctaacaccccccatgtttgtttaatttaacttttattttagtttcagaggtacatgtgcaggtctgttatacagataaattggatgtcatgggagtttggggcatacatgatttcatcacccaggtaataaacatggtttccaataggttagtttttatgtcatcacctgcctcccatcctccatccccaagtgggtgccagtgtctattattcccttatttgtgtttatgtatactcagtgtttagctcccacttataaatgtttagtgttctgttcctgtgttagtttgcttaggataatgacttccagcaccatccatgtggctgcacaggatatgatctcattttttatggctgcatagtattccataatgtatatgtatcacattttctttatccagtctactgtcgttgggcatttaggtttgtcccatgtctttgtctttgtggatagagctgcagtgaacatacatgcgtgtgtgtctttctggtagagcaatttatattccttggattgtcgggtaaaatagcagttccgttttaaattatttgagaaatcgtcatcctgctttccatagtggctgaactaatttacatacctactagcaatataaacattcccttttctccacaaccttgccagcatctgttattttttttttagtttttagtaatagccattctgactggtgtgagatggtattcattgtggttttgatttgcatttctctagtgaatagtgatattgagtattttttcatatgcttattgtccatgtatatgaattcttttgaaaagtgtctgttcaggaacatcattcctatgaaaatgctagttaattatgcaagtattacttgtttccattaattgagttttttaaaaaccttataatcaatattgcactaaaattttcagctgtgtgattccttatcactttcttggatgcaaatgccttgtatcaggtactatatctcataaatccacattgcatctaacaatgtagacaattaataaatgcttgtttaacaagcggatttgtttttgctttattttgctttctgtgttttccttaggatgtggggcattaggccaatggaaactgtctcttaaaagttcttacatataaatattgatgtcaaagtaactatttttgtacaaataaacacatttacctaatttggtgagcatttatagagccctgcctatattcaagggcgctgtgctgatcactgggcaactgaggaagtatgaggcactgttaccgctgtcttccttcccaaattgggtcctagaccgtatcttggtagagctacctcctaaggaagcccacctgtgctattgagggtacatctgaaggcagtgcactggaatgtatagcctaggactggaatttggagtgaggccctgagagatcatacacatttttcacttgtgggggaatgtccttaactagaaatagatggtgatttcagatatttgatccaaacctaacttcctcatttgaatggagtaaactaataactgttcttgaggctctggaatagtgatgaattttcctggttgggaattcagatgctgatttctgaagcagagttttaaagttgaaagatgaaaagggaacagaacaataaactcaagcttagaatgaagggtcatttttctagtccaacttccctccacctagctgccacccaagattgtcccttagccatccttagaatattaaaataaatccattgcagtgcccaaatgacttttttctatttgaaaatccttgccattggagaatttttctatatatcttaaatggttcttcatgaattttgtcaagtttgtcagcaatgtgctcatgacagtatctcatatctatgtgtattctaccactttagcctcctagacttctagaccagcagttcccaaactttcaaatatgaccccttttaatgtcaacttctgtttataaaagtacaaaagccctcacatcttatactttttttatgcttttatttattgagatattagacaacacacacttgtaggtgacatggattcttagatctaaataactccactctccatggtcattctcacttcaacacaggttgatgcagtccttagtttggaaaacagttttgacgtaaataatcccagactttcctgtcactttttggagcttttttcttcatgctttctttgcatctttcttaaaatgtgaagactacattggatatattattaaaataacatcattactagtgctatgtttaaagctgactttttcttcctagccactgatatagcagtgccaactgtggactttctatagaatgaacactttagaacacaaacactgtcacttgtaaaacccttctttttatcagaacagcagttagactttgtgtgtgtgtgtgtgtcttgtgcgtcctttatatattctacaaattattaaagacaccaaagaccttttgtttatgtgaggttttgttattgatacttactgtcttagtaattaaatgtaagaaaatttttaaacgacacatctcattagctgtcagagcatcatcatgtcttgtaggctctggaaaactccatggtacgctcatgaagaatgagtgtgaaagagacaaatagtagcttaatgttattataataatagttggactttgtgaactcaccaatataatacatattcatgacacagtccctaacatctaaaaacttacaatctaaggcccaacataaatactaatagatgatgttaaattctagcttcacagtgcttcctacaataatactaaaaatatgtgaatttagacagaggccaaaatgtgtttaataaccacttggctttgcttagtattttattacccaccttggagaattggccctcctgttttgcactttatgagaagcagccctatgaaatgttttatcagaagtttaacaatgatgtagaacacactgtttcattttataatgatccttgggcaaaatggtataatatctgtaggagaaatgctaaatgctgcagtaaaaactcctcagaatcacgtatgtttttatcgtgtggtcactataaatcatgtaactgtgctttctgatctcctttggccaccaggaagacaagaactgacaatccatttattgtaaattcttcagggtctgatgtcattatttctatgtaagattttccctggcattatcttatttctcaggtctcatttttcctttgttctgatttatttttcttaatatgttttattgtgcatttgttaatatattttgttgtgtatttaatttccaatggggatgaatgaataagtgggaaacagagatacttgatccaattgacagggactgcttgagtatctggagtggtgcagatcaagcagggtaattgtatcaggtttcattaatgaaatgggtcttaaggggagattaggaaggaaaggaagtgggttgctggagaggcggggtgttttatgtggcagatcggctgtaatcaacatgcagctgtggagtgagtgagtgatgtcctgagcacagtaaggagatctggctgacgtggcatggcacctcattgccttaatatcttttcatttgattgaagaggcagctgagggataggtgctcttgaaaagtggagtaaccatttgtaattaaggaggactctcacttcagtttctaaaataaattagaagggagaaaatataaagtctgagagatcaattaggagaaagttctggtgctatatatagaaataggcctatctgcatatgcaggtgagagtatgaagaagaatctgtgaatggcagtcattttttgtagctggttccaattaaaattgattctttactatcgcaagaacagaaaaccaaacaccgcatgttctcactcataggtgggaactgaacaatgagatcacttggactcgggaaggggaacatcacacaccggggcctatcacggggaggggggaggggggagggattgcattgggagttatacctgatgtaaatgacgagatgacgggtgctgacgagttgatgggtgcagcacagcaacatggcacaagtatacatatgtaacaaacctgcacattatgcacatgtaccctagaacttaaagtataataataaaagaaaaaaaagttggaaaaaataaaaaaataaaaaataaataaaactgattctttataacgactacttattggctgctgctcaccaggtctgcttttctcatcattgtgtgcagaacataccacagtatacactacagagtaggtgcttcataatgtgttgaatggatgaaatgggttcctgcctccaaaggagatggaaaaaaaaaaaaacagacaggcaagtaaatgaagtgaaatatgtataaactgctttgagaatgttttataaaaaaggacagcagccaaacagcattcacagtaggctggctggagtagcagtccttgaagaaacccatggaaacagcggtagaagcaaatgtgcaatagctctgccttttcacactatagggcagcacataaatagtcctggagcaccagggtccttgtggattttttaagttacctagttggcacagcattggctcctcctctcgtgtgattaggggccaggatacaataaaaatatgttatgttggaactttgatgccagccttaacttgccagttcagcgtttgtggttgcaggtagtatcagctcctctcctggtatgattgagagactgaagtccaaggcttcaggttgaacagaattgattgccttaaggaccggtttagaactcttccatagcacttgacaggaagccagtttatttttcttggatgccagcttccaagaaaagatcagtcttgagcaaaatagttcttcactctcagctcagaagcctaattgagagggtgtcctctaagcatcacagccgactctgctagtaacctgttctacttcaacctgtaaggcccatgaggctggccagtgacatcactacaggacacagtggaggatgtttaggaatgactaggtgatgaccagggtgcagactgtgtttactcaaggctaattgagaggtactattttcagtggtgtgcttataaatgtgtaacagtactgggttgaagggaggctctgacttgtagcattttgctagtgtccatggtgtaaatacccccaacatgactaactttaagttaccaatgtgattgaaagtagagtttggaagagaggcacagtagcccactgttatgtagtacttttgccatacagatgcataagagacataagtaacctgaagaacatagataattattaaatgtagtgaaatgattatgaagtgacagattttaagtgttttatcacatttgtttttaatatcatttaattttaagttgccataatttaatttgtaattaaggctatgttaataattggcttatggaatttctgagaattcaaaaaccagtgcctataggtggatccagtacaccactaggtaagaacagcctagaagtacttctaggctcttgttctgaaagatgccaagactggcatccatggttccagtgccagcgcaaggaaagacttactaggtcctacagtattgctcccaaatctctttcagtggccagggaaattatcggactgaaggcagagtgaattttgctgaatggcttgcttatattcaggtcctagtatctatgattgataatcagcttcatttgtaagtattggatggtgcaactccatgcatccaggaggctgggaggtactgagagcagagtgatagtgtcaaaagacactaaaatgaatgccagctctctcctgccatatccactactaagtgagaaattcagtgacatagtcactgaggactccaccactgctgggtgttggggagggcacactgaacatttcaagacaatctgggtaagatttttcttggagggattcaagtacgaaatagttaatatgcagaaatgaaggggaaattattataccccagaaatgagtcagataatactaaagaaaggaagaaaggaaagcatgacttgaattctgtctttaatgatgaccacagaagaagttgggtctttaaagatgacaagagaagactgatcaggtagcagtgaggtgggaggggaaagatgagagaggggacattcctagtagaggaagtaaggtagacaaagtgtaggaatgtgaaagagcataatgtgtgtaaatattgttcaggtgacttcttgggtacctaggtactagataaagaggaattagaaataagaatggaagaaggggagattcagggccaggttgttgagggcattttatgccatgctaaggagttttgaatttttcctttcagtaatagcaagaaacttaaaatgagcaggagttcgtgtttttgaaagaactaggaaaacacctctgggcactccattacctgggaataatgggtgaaatttcccaagttagtgcacaggctgctgggtagggcttgaggctttcctcttgcctcctatttcaacactgtggtcttttagggcttgtcctcaacatgttcttaaaaggaatgtttgctcactgccaaaacagtagtcttcatatttgttctgttcctttccaaaaggtaaattgaaaaagcaacataccctcagccaaaagaattaatcttttatcacctaagttactgcccactgccttttagttttaaacttaatttagtgtgcataaatggctataagcccttggaactctctttatgtttgcatcttaaatttaccagaccctccttctatctatagttccagaattttctttgtcttattttcttcaagaaatgtatttctttaaattggattgcaaatttggaatacacacagccaaaggctttcaaaatcattcttgttaaaagggacaagttacttgagaacgtttttaaaggaaaaagttaaaatagatgtcaatggaagatgcaaatacgaatataaaatatgaaaagcatctataggctggagcttctcaggagagctctacttcatttaaagtcatattatctggcaccatttcaaagctgtgggttacttgattttgtagttagaaaaaaagtataaagttgaaatattgagctctttacatgacctttttgctaggagcagtggatgaaactatcctctaagagatcaatagctttagtgtaaacttggtcaataccttattggaagaagtaactatgtcagattaggtagaaattttagaagccagcaagtttccaaatgtccttctggaattggcctcttagggccatgtggaccagagggatcttatcacagcagtaataaactaatatctattagccaaatctagctcatggacacgttgtttggcctataccacattttttttttttttttttaaagacagagtctcactctgtcacccaggctggagtgcagtggcgcgatctcggctcactgccaggttcaagcaattccctgcctcagcctcctgagtagctggaattacaggcacccaccaccatgcctggctaacttttgtacttttagtagagatggggtttcaccatcttggccaggctggtcttgaactcctgacctcgtgattcacccaccccctccttggcctcccaaagtcctaggattacaggcatgagccaccacgcctggctcacaccacatttgtatgaagttgaattggttatttttaaaaatttgaagaatttaacaacaacaacaacaaacttttgtgtccagcatttttttttttttttaactattgggacaatcctgggcctgcattctttgaacagttggctacacttaagtagctgctgccccttttagatggggcaagcgttctctactttttcacagtccctttcaagggtgcttcagccatttttgatactcacttggcttcaataaaccaaggtcatgtttaaaagattaaataacagttattacacacgcaccaaaccgtcagagggaaccagacttgtgtaccagaacagagtcctggagcatatctctgttaggctagacatcactcttttagttatgggatcacggaaaggtgcagaaagttcctgggaaggggttgggagggattctggaggatcccaagtgtgactcacacacttggaggcttgagtcaatagctttttaccagctagcatgaaagtacttctagtgtttaaaaacctatggcacagtgggatcttctaggaaagtagaccctggagatggagattcgaatatagcacatttattaaggggtgccactagtatcgatatctgtagaagagagagaaaggatgtgagagtgggcagagggagaagttgagctgcaaagcaggcccagtgccagcctcaactggctccatgaggagctctggagctggaatgcccgtttatatttgtttcccatgggatcaagatggccaggccattctactctgacatgcatcactcattgaaagtggaaagactcttgctcttgaatgaggcaatcctctgccactgaggcaatccctcaaaggagtaagaagtgaaagctgttggcctggagcacctgcagcatctgaaacaagaaatccttcattgaacaggatctgggcagcacaccagagtaatcacagtcagcagctgtaccagtgacaacagatgaatatcaactctgcctttagcccctagggtgtgacacctggcctatagcttatccaaagctgtgcctaaactctttggactgattcagaatcaagctagtcctagcctaaagagaggagtttaatgtcatgctacactctaacccaatatttgctggcttgtaattcagtcattaaagaaattctttttattttcacatagttttagattgtcaaactgttaccattctgtgttcagaaattgaaacctattctttctattctttttttttttttttttttttttttttttttgagacggagttttgctctcttgttgcccaggctggagtgcaatggcgcaatcttggctcactgcaacctccgcctcccgggttcaagcgattctcttgtctcagcctcctgagtagctgggattacaggtgcatgccaccatgcccagctaatttttgtgtttttagtagagatggggtttcatcatattggtcaggctggtcttgaattcccaacttcaggtgacctgcccccctcggcctcccaaagtgctgggattacaagtgaaatctattcttatattttactgtaacctcagaaaagaatgcttttttgaggactagaattctgtctcttttgttgtcgtctcctttctctttcccaaacctgtaattctattgtgcttaccacacaatgaacaatcagatgtcttaaactgcggcttacataattaccagtataacctttttgcttttatttttttctttcattttaatctgttcatgaggactgttacccaggtattttaaaaatctcactccattgttttaaggttagtggttccaaagggattttagagaccctgacccaataatagttatatttttctaagtgattctgaagcaatggtcccaggtaagaaattgcagttcaaagcacatcataggtttgttattttccaaattcttattaaagcattaatgcaaatggaattttcctactactcctctgctttctctaatctttgacaggattaattgctacactataatatgatttgttataattttatgtttatattaaagatatagaatatgattgccctttgatgtcaaatactaaagattctgctactgttttagttgtgctggttcttatcttccttatctttcattcaccttttcaattcatctcataaacatttaatgaaaacttattgtatatcaagggttgtttattataggaattgtaattcaaaaactttctttctctggtctgaaaattttagaaacataaaaggaaaaagggagggaggccaactgagagtataaaaataaatatggcatttattaacaattaaccagtttcttttttctataataatttatccagtaaattgtatttttaaattattgttttagtttttgttgcatatgtttaaggaatacaacatcatgttttttataattactagagtcaagcaaattaacaaattcatctcctacatagttatcttttgtgtgtatgtgtgtggtaagagttccagaaatctactctattaacaaatttccagtatggaacacaatattattaatgatagtcctcatgctgtacgttagatccctagacttattcatccttcataactgctactttgtaccatttgaactacattttcacatcccctgtgaaaatgggagggggacggtacaattcgcatggaatatctttttccatcacttaccttttagtgtatgtatgtactcagatctaaactgagtttcttgtggaaaccatacagttggatcttcgttctttacccattcggccgttctgtatctttttattgagggctttagaccatttacaatttaagtaattattggtggggacagatttttttattattattattatactttaagttctagggtacatgtgcataatgtgcaggtttgttacatatgtatacgtgtgccatgttggtgtgctgcacccaacttgtcagcacccatcaactcgtcatttacatcaggtataactcccagtgcaatcccttccccctccccgctccccataataggtcccagtgtgtgatgttccccttcccgagtccaagtgatctcattgttcagttcccacctatgagtgagaatatgcggtgtttggttttctgttcttgcaatagtttgctgagaaggatggtttccagctgcatccatgtccctacaaaggacacaaactcatccttttttatggctgcatagtattccatggtgtatatgtgccacattttcttaatccagtctgtcactgatggacaattgggttgattccaagtctttgctattgtgaatagtgccgcaatgatttaatcttgccattttgtcaaccgttttctatttgtttatgattcttttttctcttgctgtcttcttcagtgttttgttggtttttttatattgataggttttgatttcttcttttgtgtaacttctatatattttttctttgttatcaccaaggggcttacataaaatattttagagttgtaactgtccgatttatgctgatagcaacttagcttcctttgcttataagaactctctgcttttacctcttctcccccattatatgctattaatatcccaatttacatctgtttatattatgtatctagtaacataatttagttatagttgttttaatacttgtgtcttttaatttgcatagtagaatgaacatagttacctaccactgttatagtaatacagtattctgtatttttttttttttaccatgttccctactctactgctttctttttgtttcaatttgaagagctatctttggcatttcttataaggcaaatctagataaactctctcggctttgtttgtctgagaaattctttatcttgcctttatttttgaaggacaggattactgggtatagcagtctttgttgttaggtttggtgttttttttcttttttcagcacttggaatatatcatccaacttccttcagacttgcaaggtttctgcagaaaaattgtctgataatactacagaaattttattataagtagcaagtcacttttctcttgctctgctttcgaaattctctttgtcttcaacttttaacaattataatgtgtcctggtgcaggtctctttggattcatcttgtttggtgtcctttgggcttcctggatctggatgtttattttcttctcaggactgggaaattttcagccattatttctttgaatgtttttttctctctcttcttcttttatatattccataatatgtatatgagttcacttgatggtatcccataattcccttaggctatctttacttcttttcattcttttttctttttgcttctctgactggataatcatcaacaatctgtttttgagttagccaatcttttcttctgtttgatgtagtcttctcttgaataccttctgaataaaaacaaacaaactctttttcctctgctctcacagttcaacaacaatcagtaaggaagccttttgtgacaaaatgtgtgtttggggaaggggtaatttccttcatacaacaagtaagcaatcagttctgcagtaaataccaatttggtgtcctctaattcaattccaacacttctactgagagatctgcagactgggagctcagtccctgagactgtcttcctcaaccaacttccaatgccaattgcaaaccccaggttattttgcctgtacttcttactgactggctataaactggggttcccacaacccccttctcaggttcaattaattttttagagtggctcatggaacttggaattacaaagaatattttaagggatacaaataaacagccagaagaagagatgcctagggtaaggtcaggaagggtcatgagtacgggagcttctgtccttgtggagttggggtgcacaacccttcggacatgtagatgagttcttgttcaccttcctgtaagccttcacatgtatagctatctagaagctctctaaatcctgtactctttgaccacttatggagacttcactggaaaggcatgattgacaatcatgtggaaatgtgattggacaaaaaaggtattagctagtgctaacagactgaatggaaaacccagaaaggcctgtctgttcagattcttcctggtctctctctctgcagcattctttcctccagtgaatggggcaggaccttttttgaaatgaaaatcttatgacctgcaatcagacaaagtaggtcagagaatttctttatggccagaggcagggaaagacttaagtgtatttttagtttctgttgcctgccttctggagaaaaaggaacaggtgaatagagggtaagagaaagtcagacagagagattctgtttttgaggcctgcttctaagtgtctaaagcaccccagcattataataaaagactgtaataagagctaaggaagttatgagccaggaaatgtgggcaaaataatatcacagccctctattattttttatttatttattgtattatttatttatataatttctgtttggtactttttaatattttctttttgatgaaatctcacacagaccatgcattgctctcataaactcagtgagcatctttatggctgttatttttaattctcggtgaaatcggttacctccatttcattagggtcagtttatagagatttatctagttcttttgtttgaaacatattttcctatttctttattttccttgactacctagtgttttctttagattatataaaataagcatccctcccaatcttgtcagattggctttgtgtagcagaggtacctcaccaatcaacttgaccagagatttagggtgcctctttttatttttttgagacagtttcgctcttgttgtccaggctagagtgcactaacgccatttcagcttaccgcaacctctgcctcccgggttcaagcgatttccctgtcccctgtctcagcctcccaagtagctgggattacagccatgcaccaacatgcccagctaattttgtactttttttggtagagttggggtttctccatgttggtcaggctggtgtcgaactcccaacctcaggtgatccatccacctcaacctcccaaagtgctgggattacagatgtgagctacagtgcccggcctggggtgcctcttaaacttttgtgcttattcaaaccaccagttttgttcttagtggccctagataggaaggtcccaagtcctaagttagtgcccaaggtagaaacctgtcgtccctcaagaagcagctggaaatgttgaggctctagatgagtggtccatcttcctctctcctcagggataagctgggatctggactttatgccgcactcaccctgcagtaagccagagagaggatcggtgcaaaatgcttgtgctctgtttcagacaatgcagtctctaaacatttactttgctctctcatccccaggagacttgcaaatggcaagtctccttagctgtcctggataagaaaattagctggaagcttggttatgtttctggagtgaggagctgcaggaagtgccctcatgcctgttcagactcccggaggtctactaattgcctgctccatcagctccctgatgcaggctaattaatagcttaatccacggactgcagctaggaaagtcagaatattatgtacgtagtctaactccatccagggagaaactgagagctaggtgtttttgcttgatcactctgcactgagtttggggaactagctgctggtagtgcacttgagctcatttaaaaccacttctttgttccttgcagtcttgggggactcataaatgctagatccccttagctcccagagctaggtgatttaagagccagtctctcaggtgggagctgtaaaagatggggtgctcaatgtatggacaaactccttccagggacaggagagattagatgctttatttcatcattggattgagctgggggagaaggcacaggaaatgcccacacactagtgcccacataccctttcaggctcccagaggtcttactaattacctgccccactggctcttagcccacttagtaatgctataaggaatacctattgctgggtaatttaagaggaagagaggtttatttggttcgtggttctgcaggctgtacaggaggcatgatgctagcatctccttccagtgagggcttcaggctgcttccactcatggtggaaggttaaggggagctggcatgtagaaatcacatggcaagagacgaggcaagaaagaaagaaagagaagaaggtgccaggctcttttcaacaatcagttctctcatagaaactaagactgagaacttacccactgccctgacaagggcaccaagccataaatgagggatcattcttatgacccagacacctcccacaaagtccacctcccacactggggatcaaatttcaacatgaggctttctggggccaaacaaaccacatcaaaacccgtctcccagttttagactatgtagagttttaatccttgggcagcagctgggaaagtttgcaataaaacccctaccagagagaaactgagcctgagggaattggagtaggaagttcctgcacacctgtttaaaattgtctccttgttctctgtggcccagagatatttgcaaatgctgagcctatctgctcccagagctaggtgaattggtgatatggtttggctctgtgtccccacacaaatctcatctcaaattgtaatccccatgtgttgaaggagggacttggtgggaggagattgatcacggggacagtttcttccatgctgttctcatgatagtgagtgagctctcacaagagctggttttaaaggtgtttggcagttccctctttgcttactttccctctctcctgccaccatgtaagatgtgccttgcttccccttcaccttccaccatgattataagtttcctgaggcctccctagccatgtggaactgtgagtcaattaagcctctttcctttataagttacccagtctcaggtagtttctttctagcaatgtgaaaacagaataagataaggagcaagtccctcagggaggagctgtaaaagctgaggtgctgtatgtgtagttccaaccctttaatttctaagaaggtaaagctaggagttgggtttccttcctgattacaaagtgatgtgcctggggtggggcttttggtatgaattaaccaatttcttaagcatcaacttggtgttccaaactgtgctaagggctagggaagaggctttgttatccttatttggagagagcttatagtctaattaggaataagaaaattgacacaaaataacagcaaataacaaggcaacagaatcagttgctacatgttatggtggtatataaataaatgatggtagaatttagaaaactgaaaggggacagggtagacaagagtagtcaggaaggctgcatggaagagaaggaacttgatttgggtatagaagaaggggctgggatttgggaagacaaaaagcaagaagagggccattccagtatccaagtaatgacagatagagggacagggcgtgtatgtattaacatgagaatagcagaagtttgatgttggttagaacttactaccaacttcttacagaactttcccttaaaaattctgagtttgaaaacattcaacacctcaatctactttcaagatttcctggcaaagtgaaggaagcaaatacctttattattttacaactgaagttacctgctttgtcagttatgatctaggctgattctaactacctactggcaacctagaacagtcaaaagacctaggaattcattcaaaagaccaaaatctgcattgtctggcagtgtgagcatgagcaaatcacttcatctccttgagccccagttttctcatctaggaatgaaaagtagagccttatctatctgaccaggttattatgctattaagttatatgagtaaatgggaaaattcttcttaaacaataatacaaattttagttggtacttttgttaacatctacactagaccacatttatataggtaatttaaaagtaaaaaagaatggggaattcatttttatgtcatggatttagattttttcatagtagaaagttaatcattcagcagtgttttttacatttcaagtagcaaccatcatattgccatgaaatttatttagtagcccctaactatttttttttaatgaaatagcataggatgaaagtatagtgtatattgtactttttagggcagtagattatatcattcatcatagagataagtgtcgtttagtgacacacaaaggcataagtgacatacacattggtcaaaatgtaaaatatatttctttttgtagattgttgtcaaagaagattgaaagacattaattaacggtatagtatttcaaatataaaatcctcagtcttcatattttgaaccttaaattatactaaccaaaaagataaatttcagagaaaagttattttatgtaaagaaagtgaaattttgatgaaatgagacatgctaccacatattctttattttattcttatgtttcttgctgaaacccaaattctgtcttcacttctgctacccaagtatagaaagcaaagggtttgctttttgcatttccatcaaaatctacatgcctagaaactcaatgtgctctattttttctggtagttcttgagttgtttattttaactatcaataaatattatgtaatttaaaaataaaacttaatttgtgacaaagtcagttttcagtctgggttcacagaagaaagggatggcatatgcaaaaaggatgtaaccaggaagagtgcaataatatgtctatatacaagagggttgatggagttaaggaaaccaaccaaggatggtgaagaacccagagctaggaagagggtactagctcccaggcgtgaaagggcacagtgttctaggttccagatgtgacactgatcagtgggagaggagcagtatgactagtgccatcaggggaaaccacagtcttttcaggaaagagggagaggcctggaggggacaggtgcctgtggctgaacccagtgaagaccaagggttctgggcaatgtcatctgtaatggccaacttcctggggcacagagcagggaagaggagagtggaaaatgaatgtggggcaacaaatggggagtaaccagcaacctatcatatgaatgatcatttttcatgtcagatggtggcatatagcttttctattcaaattcagtttccttcctctgttttctaactgttgaagtgttgtcttttacttcatgcagtctacagaatatcctgtgctgtgctgaaagaagacaattgggagagaaaacattagtgaacttgttgtgtaacttgtcaaatgatttagcaaacacttagttaaggaaatagctatacttatagattattttttaatctccatttacatgatcacgatatacctgcttttgcagtttgactttgacaagaagcaaactctgagatggagtttagtggcaggacgtttattaaggatcaacgcctgtggagaggagcccccagctgaccccacaaggagctctggagctaggatattccttcacgttgctacccacccccgactcccaccttggttgatacagtcaggcctttgtattccacatcactctgtcattggatctcagatgtaagctagggaatgtgaccttggctaaaagaggcaatccttgaaggggctgagatcttaaggcatcagacacttccttccttgaagggggttggggcagagcctcacagaatccatcatacctcccttcattcaacatacttctaaaaaaatatattgtgagataaaaatggtttccaagttttgaaagttctgcctctttgcaggaagaagggacaccaattcttgttgagaatctagataccctataaagagtaaccctcccaaagaaataaaatattgcatttttattgagacatctatgatccttggaggtaaggttttgtggatttgttttttgtttgcttggagcgctccctgtcaagcattgatctctttacgttcctaagtatgcctagaactgaaatgaggaattatcttaaatatagctattcatgaagtatcccagtcagtgtctttgaataaaaatggcccactaaaagcttcctattatttctgatgcctcatattggcagattctgaaacaggtgactaaaaaggtaaaaagaaaatcaaattattggggactcagtcttgagtttaagcataatgaggacccacttggcattaacttttagtcatattccccatcaagaaattgttctccagaaatctttataaattagatagttaagtttctaaaagatgactgtgaatctaggactgatctaccaatgacgagaactgaagaagcacttgcttaaaaaagggaagaggtatttacatggtacagaaaaaaactgataagtaaatagtcggaaaaaaaaaaaaaaagccaggggtattccaaggaaagcctaagaagaaaaaaattcaaaatgcagggacaaggataagggtctgtatcagttataaattctttttagtgcaaataataaaatatcccattaatagtgactcaagctatatgaacctttactatttacctaaaaatcaatttagaagtaaatgatctcaggttttgttagaaagcttaggaaaatcatcaagatctcaagctccttctggatttctgatccaaccccagtcagttatttggcttcactgcatcatggtcacatggcaactgaaactccagacagtgcatacacgttcaaggtaggaatatgggagagaaagtggtgttaatgagctcttcccttgcatcttcccatcttgtaaagcatctaaaggttttccagaaggcctcagccaactctcacttatctatctttagctggttctgtcacatgctaccttcagttgcaaagaatgttggaagggtgagcatgtggaaaggtgaatgagctgccctaactggcctagactaatcctgatctagcccatggtagggtactttggttcctagctgttgggtagccaaccagtggtgtctgcctgcaggaacttcttagaagggccaaagataaaggacgaagtgtcctcattgatttcatagacacaaccagttctagatcaccggttcaaagagcgtaataaattagtagagtgggagaacacaaaattaggaagattcatttctgctttattgtgatctgggtcaatttttgctttctcaatattaatcttcaaaaagatatcctttgaaatctcaaaatccttttctataatttaaaaacaaccttaccatctgtgtcctctgtcatatggtacaatattcaagagggtgaaataatggtccagtaactaagaaaagacttaggggatgaattggccttagtgactgtcactaaaatgtaaacatggctttaaaaagtaaatcagaaggaatgaaagggccttgacagctaaggctctcaggaagattctagaaagacatgaagcacaattttgtaagtgtgcgataggagttactcttcttcttttattcatgtgtcatagaagggaaaggaaatttttaaaagagtaagaccagccagatatcacaagagtatagaggaatgtaaggatagcatgttcaagggcaacatgaagagtaagagaaaatgtcctggatgccaagactagctctctttattgcaaagcttgccagactctttacccagtacatgtactctactctaagaagaagaaacaaagctaagtgactgctaagctcatggacaatgtttttgggtctctccagcagccacctagtggctgactaggtaaaatcatttgtttttctcaagatgttgtaattctgagaatgcagggtttggctgccatgttagcctggattttctgagatgcatccctgcaagagattcactgagaaattagatgtgcaagagatttatctggggaaatgcctatgagggaaaatggagaaggagctgtaggaggctggaagagatgaacactgcagtacacgtctgatcccagtgatgggaaaaaaaaaaggaaaggaggaatgagaaaagggaaagaaagaaggagggaagaaaggaaagagatagggagggagggaaaggcaaagacaccagtgcagtgccaagaaagttttggcaaggctgatggggagtcttcaaatcaaagtcacttgaaagaggaatccccttatcatccccccaggaatgggcctgccttggtgtcctcatgcaaagtcactggctgggtggatttcagagcatagcagctgaggtcataggccagttacactctgccataggaggcttgagagagcattttcatagctgccacatttgccactgcaaccttctgggagtgatgggttgtgctggaagaatttgaagatagtatcttatgctccggataaagaaatgcattgatgaaggcccttcactattagatttatttttctgtgtcccaactattatataaattcccctatcaaggaattttcaatgttttctccttgcccttagatacgtgatcttataccccaggtttgctgagacattccttttacagatagttctactggctcatgagtgtaatgtgtctaaatgtatggttggacaaatacggttattagatctaaattttaagttcaaatttccttagcctgaagtttagagtcttccacagtctagtcccaaccactttttccaaccttaattaccattgcactttaccctgtatttcaattcatttgaaatatttgctcttttctaaattactctcgcttacccaccactatctctttgttcatactgttctcttcaactaagattaattaatcaacatgtatttattgtccccttcccatgggccaagccctgtgcttagaactgtatgttaggggacaaaacgcacatggtttctgtcttcctagagtttgaatttagtagaagagcaacagacaatacacaggtcaatggacagttcatgcttacaaatcatgtgacagtgtcaaaagtaaacaaagaaggttccctgatagagaattacaggaaggtttattttagatagagctatcaggaaagaaatggcatttcagcctgaacttgaatgataaagggaatgtagttactaaggacttaagtccttcagataccaattccatcatcttcaagatattgccatgatcttcacaaagtttttcctgactcatcattggactctcaaccgtttttagccctgtgctatctgcgtcttgtatattacagaaagtgtttaaggtcacactataaactaaatgtgtttgtctccaatcagactgtaagattgtggaatgttagatccatgtgtgatgtatgtctttgtctcttatcagactatatgattttggaagtttagagctatgtctgtatccgctataacatttatctctgtatctgcatgatacttaggataatagtatgtgggcacatccaacaaatatttgttgaatgaataaacagtattccactctctgcaagtttggcctttctgacatttgtctgaattatagaaggagaaggaggctttatataatagttgaaaattactgttcacgtaatacagagttctgaacttcaaccagaagcaagtctacagcagatgaaaacatttcaaatgagggaattagctgtatataactttaggatagggttgtataagtttagcatttatttgaaaatccattattatatgcataattaagttttaggaagaaaatctggctgaatagtaaatcagttactattttcaaacagttcttcagtagttagttaccactggcttctagaatttaactggtgtttttttttcagtatatcacactagcatgtgggttgagacacaacctcacattacaaatgggtagtcccttgacttgtagatcaatcagtaataatacaactactgattttttacagtttgtataattatttgtcatttctttcccttattatctgtattctcagaaacaaagagtagaaacaaagagaaaggacatgatgtatttttgataggctaccatctcaaattttcattccaatgtttatttggagaaacacttttatctaaaatggaccttttcatttgacaatggcacttgctctcaaaatgagaattgcgccttccaggagagttttccatctgactccaaagccttgaccctcacaaacagtgttgtttgtaatggcccctggttagaaactctcagcctaacaagcatgcagcatagcccctgaagtctcccgtcctatctgcataaatttgggatatagcactcctgcacatcaagcctcacttactcataaaatgccgggaatcattccaaattgctcttccagaggagagtttgtttttaaaattatttcagatagagatgtttcaaagtctacataaatgcataatatttttttctgattgtgctttcttggtgtttctcttgctgtaatacctacttcgccattcttcagggagcacttcaaggacttttgtaatccatatagccttcctaagctgttctaactttcagcaatcccaaccacatcactgacctagtttgtaatgactcaccagacaatgtgttgggttctctagtaatactttgttaagtccaagttatcctttctgctgttgtttctcagtgtgtgtttctatctgagctctccagttaaactgtaatctacttaagcactgggctttgtcttatactctacttctcacaactcttgcctcttaaattggttaatgtatgtttgatgactaattgtacacataatagctacttaataaatgttcttaagaaaaggacaaattaagtattttccctggtaaccctctataccaggcatcactgtggaaagatgcagagttgagaagacagcatttcaaaaactggaaaaatcacttgtaaattatttcagggattcgactttgacattatgttgacataaaaagagccttaaaaacagctattagaaaatagacaaaagtagaaacaaataaatgaatgagtgaatgacatatctaaatgccatgaaatgtgaaaatgatacaaaatgttaagctaatccttttttcttctctaattaatctccactgggtatggggaatagggaagaactggggtattcgcaacaggcaaacattcctgattcttgccctactaaagatagggacattaggagaaaggatcatctagttggaaaataaactggcattgctaagtctaaatgattgagtcaagtgcaaattttataggccaaatagaattttcacaagtccattgactgttgaaaactacttgtaccctggctcaaaggacattttcttgctgtctatagtaagcggtctgtaaactgtgtttgggaccagaaccaaatgctagcctttcatttctcaaattatagcttagtaatcccagctcaaaagtccctgcatacacaatttagtaaaattagcagcataaatttagaaccagaacgtaactatgctttgttccctccagaagtaaaatgtgaaatttcttcccattggaagtctatttatcacttaatttcagatgttgtgatactgttttcatccaatgttagagaacagaaagaaaccttttttaaaagcataactttcattattcatctaagtttttttcagggtccatgagaaatgctaagattatgccttgtgtttgagaaatagaaaaggaaaaagggaggaaaaccacctagagaagtgcttctcaaacttcaaggcacacgtgaatcacctggggaccttgcagattctgattctgaaggtcagaggtggggcctaacatcctgcatttctaaggagcttccagggcatgctgatgctgctggcccacagaccatactactttgaatagcaagctttatcggccatagaggactttttttttctttttttttttttttttttttttttttttttttttttttttgcatggaacacagattactgctctactctaggttacaattccaaggaaataatgactgaaggaaaatactgctatttcaacacttctgagtcatttagttagaatggaaggttaacattagcaatttaatgtggtgggagtatttattgatgtactaatttgcactttgttcctgccaaagctttttactctgttggctccagggagtttgaaagcctaggacagaattgtacttcctaggtttgtttacctattgtggcaaagaagtgagcatctttggagttaaggagagttaagacccaaggagaagaaaaagaaaaactatgaaggctttttaaaatgtgtatccctgtgtaagatctccaaggaccttcccttgacccagtagtagcaaacggaccacagtgatggctgaaattgagtatctcactaacttggtaaaagttgggcaggctcacagtcagacttaaatcattttagagaagtacaataatgtggcattccttgcaccctgatgatatgcaaaaaatacatacctgcttctgacggaatttaaacatggactgttagcaagaatgtacccttaaagttttgtaaactctacagcaaaggaaaaaaaactgctacagaaaaaataaggatttttttttctagctttaccagtaacctataccttcatttcttcatgttactaattacagaaacttttagcagaaatgtatcactcttgggcatcagctagttctaaacattttagctcttaggagcctctggtgacaactgttctgttgttagttttgctctctgactagattgtaacttctaagctcaggaatcctgtcttcaactagttctctttagtactaacctaaccaagagctaggcatttaggaaatgctcactataaatgtattgacaaatgattatgtgtaattagctcttcatcacaatatttttcatcatcaagaaatagatttaagggagatattttcaaacagtatgtatatatcatccccttacctttatgtatgtgtctgtttgtgaagtcagcacatattatgtgctaaactcaagaaactcaagaaacaagggaggttactttctaagcctgcatcatagcagtagaaatttggaagaaaaaaaaaaaaacccatacaattaactgagttataattaaagaaaattatatgactaccaattgtaatatttctaaaatatacccacatatgccaatctattgtaagaaaatgttcgcagagggaaaacaatgtaaattcctagaagctttagatagattctaatgattggaaataagtattacaaatagtccacattttaatgtgacttctagaatgttttggaggtcatagtatccactcacgctcttatgctgcttgcttacaacatacacttggttcccatttttctcttaggaaagatcatactaatgatctgtgatcatatttaccacttggggatcttgctggccatgataaggaatttggactttactctgattacgtgggaagccactagagaattttagccagtaaggtagcatgatctttatgccttaaaaaggttaattgttttggtggatagttgttttagtagttaattgaaggaaggtaaaagtggaagtaggaagaacagttaggaatctatttgattgttcaggaaaaaggtgctgggcgcatgggctataataacaaaggagatggagagaagtaaatggattgagatggaactgaaagaacttgttgatggttaaatacgaaaattaattcaagatggattagagacttaaatgttagacctaaaaccataaaaaccctagaagaaaacctagggaataccattcaggacataggcgaggacttcatgtctaaaacaccaaaagcaacggcaacaaaagccatagttgacaaatgggaactacttaaattaaagagcttctgcacagcaaaagaaactaccatcagagtgaacaggcaacctacagaatgggagaaaattgttgcaatctactcatcagacaaagggctaatatccagaacctacaaagaactgaaacaaatttatgagaaaaaaacaaacaaccctatcaaaaagtgggcaaaggatatgaatagacagttctcaaaagaagacatgcatacagccaacagacacatgaaaaaatgctcatcatcactggccatcagagaaatgcaaatcaaaaccacaatgagataccatctcacaccagttagaatggcaatcattaaaaagtcaggaaacaacaggtgctggagaggatgtggagaaataggaacgcttttacactgttggtgggattgtaaactggttcacccattgtggaaaacagtatagcgattcctcaaggatctagaactagaaataccatttgacccagccatcccattactggggatatatccaaaggattataaatcatgctgctataaagacacatgcacaggtatgtttattgcagcactattcacaatagcaaagacttggaatcaacccaaatgtccatcagtgacagactagattaagaaaatgtggcacatatacaccatggaatactatgtagccataaaaaaggatgagttcgtgtcctttgtagggacatggatgcagctggaaaccatcattctcagcaaactatcacaagaacagaaaaccaaacactgcatgttctcactcataggtgggaactgaacaatgagatcacctggactcgggaaagggaacatcacacaccagggcctattatgaggaggggggaggggggaaggatggcactgggagttatacctgatgtaaatgacgagttgatgggtgctgacgagttgatgggtgcagcacaccaacatggcacaagtatacatatgtaacaaacctgcacgttgtgcatatgtaccctagaacttaaagaataaaaaaaaaatttaaaaaaaaatgagttggaggaagttagagaaagtgaagtgacaaagatgactcagaagtgtttggcttaagtatctgagtggatggtgaaacaattttcagggataaagaagaatttagaaagaatagtttttttcagacattagtcaagagttctgtgttaggattgagatgcctattggataccaactgaagatgctgaagaggctgattagagtctgaagttcaatgaagaggctcagactgaagatagaaatttggaaccatcaacgtgtagatgatatttaaagccatgagacttgatgagatgccctttgcaagagaaaaaaaaaaaaagctacaatattggagggaagagttttgtgacaggacaatatttatgggttaggcagaggaggagaagcagtaaaggagaccaagaaagaacactcagtgagctagaagtgacagnnnnnnnnnnnnnnnnnnnnnnnnnnnnnnnnnnnnnnnnnnnnnnnnnnnnnnnnnnnnnnnnnnnnnnnnnnnnnnnnnnnnnnnnnnnnnnnnnnnnnnnnnnnnnnnnnnnnnnnnnnnnnnnnnnnnnnnnnnnnnnnnnnnnnnnnnnnnnnnnnnnnnnnnnnnnnnnnnnnnnnnnnnnnnnnnnnnnnnnnnnnnnnnnnnnnnnnnnnnnnnnnnnnnnnnnnnnnnnnnnnnnnnnnnnnnnnnnnnnnnnnnnnnnnnnnnnnnnnnnnnnnnnnnnnnnnnnnnnnnnnnnnnnnnnnnnnnnnnnnnnnnnnnnnnnnnnnnnnnnnnnnnnnnnnnnnnnnnnnnnnnnnnnnnnnnnnnnnnnnnnnnnnnnnnnnnnnnnnnnnnnnnnnnnnnnnnnnnnnnnnnnnnnnnnnnnnnnnnnnnnnnnnnnnnnnnnnnnnnnnnnnnnnnnnnnnnnnnnnnnnnnnnnnnnnnnnnnnnnnnnnnnnnnnnnnnnnnnnnnnnnnnnnnnnntaggcagttcattttacacacacacacacacacacacatacaccaacacagcatttgctacagatcctaaacttgaagccctggatcttccttacatcatttacccagaggtatctttgtcaacctttttaacttatacccaccagaaagtagaacaaggcagaagttgtgtaggagttctgtccctcccccctcacctcctggcctcagcacaataaatactgtgttgagaacttggctaactgcttcttttcccacattcgatcagggaatacttaaagccatacagtgtccctgttcttccaaaaagcatatggggcaggttgccccttcaggctgacacaaagacacactgtgcaagacatctatggccagtggagtggccgtgtatgttttatcaatgaggcttttgacttgtttctttatgtcgtattgtcatcacgttaaatagaattcaaacaaggaaacgaaatttatattctagacttttaaggcattgcctgccttatagctatgaaactttttttttcatacctggtataattttccaccttaaacgatgttgtgtgatttgattatggttttgactctcatttaattgttcattttaaaatttttaactgaagttagatttagatttaaagttcagtgcccataaaggatacttctcaatagagccaagaacttcagaaggcacaacacaaaaagggcaaagttcaaaacactaagcatcaggtaggtactttattgtccagggacttgtctaggtagactgtcaccttatccatcttcattcgctttctagtagagcttccatcttctactgcaaaatagtttctggaaccacttccatgttgaccaaaagagagtgtcaacaattcctttccaaaattgccctttagaaagtgaatctaaaatgtttgattcaagtatgtgagggtagctacatcaaagttttcttttttactatgtacaaaagtgacagataaatccatgaaatatgtgcatttttctgctaagactgcttattaatttaaaaagaggttgttagaataaaaggtcagagagtcaacatattacaaatatttattgagagcctgctgtgtgcagagttggaaaagataaaatgaggttgctactttcaacagacttacaatctaattgagggagcaacaacataaacatgcaaagcaaataatgcaagatacagcataagacataattaactatcagatgagtgacatatataataaataccattaattcaccagcaatcataatcagaagcactatgtgccaagcattctgctcagtacttcacatacattatatcattttttgaaatattatttctactttatagatggaaattgcctctgatcttccctcctttctggagaaagcaaggagaatggtataaggtagacaaagacctaagcagatatgttggtctggggcaaagggtccgtttaggggaatggagagaaatgaaccctgggaccagcattagtctgtttaccaccgtatcccagggcctagtattgtgccttgcacataataggtgctcaataatatgtcttaaaaaacaaatggccctctggtctgtgcctgtaacccagaccaagtaccatggaataaagttaattagtgaattaaagccacataccacatagcctaaggacccatccccaagacctcccaattcccaactatgacggtaaaggatcgcagtggaaaagatacatcatagggggatagcaatagcaattccagcttactggggcctattttatggaatctgacatggtgaacagttcataagtttatttccaggcttcaagaccctgcaacatctggcctcttgcacctccacaacctcaaatccttctattcttccctcactcgctctactcctgccacacacacctcctttctactcctcaaatccatttcagggcctatattcttgcttcattttgcctggaatgttcttccacaaaacatctgtgtggctcattaccataccttcagatctgtaagagccactctccccacatcttcccagctgcctggcattatagtacacgtctatttgcttatgtgtttgtccccgtacacactggaacatgggtccagcgaggcagaattccatctgctatttttaccattgaatctccagcacataggacagacatagcacattgtaagtactcacacacagcaactcttaactcaggattactttttctggctctgaaatacctacttccaagagaacgaaatttattcaagaaatgttggatggaaattgaagagtgagcttggaaacggcagacagagtggcaggagcccagaccaacctgtttatgaaagatgcctttgcccataaagggaaaaatacaccttaaagcctctgccaaagtatatgctttcttaggacacctctgacatgctgaatggcacctggtctgaacaagaagatctatggatttgccaaaacaactaattcctgggacttaagaataactactaccagtatcatcctagtaaacaagtagcaagcaacaagcaccacatgcaaaatcattcaaatgccttcatgcaggtgacagtcagtggaagaaattaatcttatttttattattttttcccttatcaaacactagcaagggaccagatgtcataaacctagttaaaatatgttgactttacctcaaatttgagtattcatggttccaaaaggacacttgttataggatctgatgatgtactttaaaatcttcttttgtgcaaactgaggattcagagaccacaaaatgtatggtaaattcaaagtactattataagtaaaatcataatgcctcacgacatttttgaaagtaaaatatttaggaatattacaaatatgtattgagcactccctatatttaaggaactgtgctaatgctgtgatggatcaaaaggagaatgagccatgatccttaccttcagacttcaagcttattattcattgggcagttagataactaacatatcagacaaggaataataagtgccattgtccagatattaaaaacaaaattggtgttgtggaagcacaaagaatgcagagatggatcccaactgggagaaagaaaaagtgcttcctaaagaagacgctcagattgaccttgaaagttggatgcttttgcacaggattagaaggtaggaagtcttcatttgttggacttgccaattattttggtgtaaatattcccactgtggctgatttaaagttgataacgtgatgcaactgaacacagaattgggaagagaaggtggctctagcacactacctatgagtcaccatctgagctccaggcttaattaaatcagcctcctcactactattttgaatgagtgaaatcacaaatcttaaaaacatctatgctaacattatcagagaagagatagtcacttctatcattctccattacaactccatctaactttctaatattctctttgaatatccttccaatctcagtctcagtcatatgttcctggctggcctacctagaattaatcttggcacagtgccaaactgtgattctgtttgttccttttagcattgctgtgattaatctgcactcctgttatcacatggcatagaaaactctcttactgattatggcctggtgttgacacctctgctgttctccgtaatgaaaagcagctttcagggtggctagctgggcaggatgtttcgctgctcttgtaacagtaggaaggaaaaactggaggaattactgggaagctttgcagaaggaagatacaggccagccgagagccagcattcctattacctgctcctttcagtattctttgtgaaaacaccaccaccagtgtgttccctggacgtcactactgcacctttaactggccttattatgctagggactacattagaaaagccagactctagtatctgtctgtaattgcaagcggatgtctcagcacatgcacaagcttatgtcaggaggatgtttatgaaaaactcacaaagcagagcactgctagacaggaaataaatatgtgaagcttgaagttgttaggaaacttccacatttgtctctctaagccagagataggacctgtgagaaaagaaggtctttatcattgcacattgattctcgttaccttgaagacttgcttttctcaaaatacatttacagcaaaatgtggccgctgcagatttatttaaacatgtgcttttttctatgacactggtttctcttccaaatttgttatctattattttactgtaaagcattaaaaagtgtttgaaaccaccagcaccatttcacagttcctgtgttatttgtttaaattctctagctcatgtaatatgccgtatgatttactgtttaagtatagaagaaatacactccctcatggagatgtggagatgtggagaggtaatactgtctcctggaaaggctcagagatttcctgtttagattacacaggcttctttagagctgccaagagtcataacatgtacgagataatacactttggttcaggagaaactatggatgggaatgtaattaattcactgagccacaaaagaaaggaaattccagcgtagagctgtcactgcactcaggcccggtggacttggtatgccaaggggtagccatgatcaaaaagaggattgcagcctgaggacccactgagtagtatccaaccacagagcaaaaggtgggggcctggctgctaagggtctcacctggttctttgagaattgatccctgaagcgtatttctgctcaacacttcagcaacctggcttcatcagtataactttccagaatgcttgtgacattgagataaatcaatcagcatgtactttatcaaatgcctcctcatgagtaccaactgtggcacatagtggggaagccctagaggaagaacgctgaagaggatatggtgattctgatcagcgcaagaaggtatagtgaaaagtgtcctgaactgtgtcttgtcataagaatcgcctgtcagggaggggtgtggaagggcaaggtaagcatacatattctcaggacctttccaaaatgtagagtgaccagggacctagagattcagactctgtcgatctggaccaaagacctagacttggtatatttaataaatgctgtgtgaggccctttacatgcattacctcctgtaattgtatagaacagttgctgtatatggtactatgtttacttgtatttgcactgtctattcagggatgtttcaaaatgccattgctatccaactggtgaattattattcttgccagaacattgattctcctactcttgctcccttaataatacactagagaactgggattgactgcatttagtctcaggctgaatgaatcattgccataagtagatttccatcccctactccaccgatacatttgccaaacactcttaaagaatagaaaccactgcctacatacagcctgcaccgggaggacctaaatagtctagctgggtttatgacaatatcccatcttcacatcagcaaaaccctaagtgcacaaagtctaatgtaaacacattagactccataggcatcttctccataggaaaagacatgccccggctgtcaaggtagtggctagcaataataacaatgacaaaaacaataacaatgataaacatgtataacatttacttatcactaattgtattgtaaatgaaatgattagcatatactaactgatttaaatcttatatatgtatagatacttttactctcccaattttaaacacagagaaaccaaggcccagatacgtgtttctgttgggaagttgagtacaaagttgggtgtaagtagggaaagttcaactgcagtcggttctagtcttggtaagtccactgtgaggtgctccacctcaaagcatagcaaattagtagttccccatgtttgcagaatcaaaattaagttctttggcaaggttctccctgatgtgcccctgcttcttccctaactcaacacatcctcagctccatctatgcactcccaacacatcacaactctttatatgcccaggctgtgtcttctgtacctttgtaccttctgcacctttgtttctttagcctcaactgccctttcttttcctctacattaccctttatcccaaatttagcacctgtctcaaggagtcaccttccccaggaagtttgtccaaatttgttaacagatattccattgttcctccaatgcttgatccttctttctttatagatccctgcctagaaaactggactcactgaggccaggggctgcaggtagtttattttataacccagcatttaaaagtgcctatttattgatttgttgggaatagttaataaatggagtccttgcagatcataaccaagagcacagtttgtaatggtttcattaattttgttactattggatgtgattctctgcttatggtcttcctttacttgtttttcccttactgctcagcacctgtagatattaggtacatggctctgacactaattaaaattgatgactgagaatgacacttccatttgctaagccagcgcaattttgttcattgtgctttactttttaacgagcaccctctcagcagtagcataaatctatagtctttccatgagggtaccatttgttccttttatgtcttgattcattacatattttcaggagtgtgagctgattaagagtttttggtttgtgaaaatgtcaccaaatgcacgataaaggcaaagtcaccagatgtctgcttgcaaaaaaattaaatgctggtttgtgaagatccaaggctggccagggctccccaagcatttccaggcctgagctctggctctacactctccttagggtctcataactgacccccacattccatttctgccatcatggaaaaattcgtcaactttactgctgatgttaggcctggaaattgtcgtccattcgttttctcagattcaagctgaaaatggagacaaacttcctacgtaattttgaccaaaataacacatatgtttatgtgctatcccataattaacatacttttaaaatcactttcttgaggtatagttggcgtacaaaaatatgtgcatatttaatgtatacagcttcattaatttggagataagtatacatccatgaaattataactgcatgtatgccataaacctattacctacaaaagtttcctttcactttctttgttattattttgattaacttaatttttttcagccttcgaactatcaaaattttctcaagtaatacatagttgtcagttatacaaacttactgaaccttgatcgaaggtcctcctttagtgctcaacttagagaaagaaataatgaaacaaagtgttctctgatttgtagcaaagatctgtgatggtgatgggaatggttctagaaaataatgataataataaagacttagagtatcaaagcagcaagtatgtttgaaggaattgttacaatgcagttttgctttctggtcactttaaaatcaaggtgtagtactttatttactctaggaaaatgtttgctttttgtcataatttcttattgcatatgagagtaaatgatctatagatgaagatattagtaaaatttagagagagaataaaaaagaaacactttcacagctgaaaggctgcttcccagttagctaactgggaggagttaatgaaaaagtacattaaaaagcggctcggggaaggtgaattggactcaccgggctctgacattcagagagatgggaatgagtcagctcactgtccagtacatctttattttctttctctttcttgttttatatcagaaatagatttcttggcattgttactgtgggtttctattaaggactgaaacaaaagtattaataatctgagagtatgtagaaaacaaaataaattcactttctcccactatactctcacaacacagaatattttagtgaccagagatcaccaaaatgtgtgtggtgttgaccaaaagagtcaaactctgtaaaatatttgaaaagatttattctgagccaaatgtcagtgaccatggcccatgacacagccctcagggggtcctaagaacaggtgcccaaggtggtcagggcacagcttggttttatatattttagggaggcataagacatcaattaaatacatttaagaaatacattggtttggttcagaaaggcaggacaactcaaacagggggcttccaggctataggtaaatttaaacattttctggttgacaattagttgagtttgtctgaagacctgggattaatggaaaggaccattcaggttaatatatgtttcttattggacctaaaacagtgcctggctcttagttgattattgcctggatctgggaaggaaggaaggaaaacaaagggggaaggagatttgctatagaatgtggatttttcccataaaagactttgtagggccatttcaaggcatgacaaggaaatatattttggggttaaatatttttttccttgtctcataatgttataccagagtcagattgaaaatcaagtcacaatatacagggtcaaataaaacccatctaatgagaacccttggtttgtaggtcatgactcccttgggtaggaatttgggcaagataaaagattgaaacttagtcctgggtgggaatctctctccacacaaattctccaacaggttcttcaacgggacgccaattgggtgttctctaattcaattcaattctgacagtctatctatctacctggaaatagcatcagataccacaggtttagggctcagtccaacaatactgcccgtcacttcagatgccaattgcaagtaataggttgttacctatacttctggccaattagctgtaagttggggttcccacaacctcctcctcaggtttggtaatttgggacagcttgcttacatttaccagcttattagaaaggatattacaaaggacacagatgaagagatggataggataagatatgggacttggagttgcagagtttccatgacctctctgagtgcagcatcttcccatgttcagctatccagaatctctcacattaagacattggccactggtgatcaaattaaccttcagtccctctccccttcccagaggttggagagtggggctgaactgtctcaacctctaatcaactcttggtctttcctgtgaccatcccccatcctgaggctctccaggagcccccaggcgtcagacaactcattagcatacgaaaaacacttatcactccagagatgccaaggattttaggaactgtcaagaaacagaaacaaggtcaaataggtatttcacaatatcaccagtagtttcactgggaggtaaaactcaatgtttactgtgagcctgagctcacagtaaagttatctaagttatcacagtaaagttatctaagaataacttagaggtaacgtgatcagatatggggaattctggagaaacacctttcactaccaaacccagacaagagatgcgtacttttctagctgggatgcttacaaagcaacccattgtaatacttaaaggtagagtgacactacattcatcatttttcattttttcctgttttttatgccgcctactactaatgtcaatcaaattatgactgtgtttatactgatcatctcacatcataaacttgatcatctcacatcataaacttctgtgtctctcatgttgagcttttcacctcccttcattccctccctacttccaggatcattcacatgttgatttctaaaaaaaactttttttactgaacttattttcatactgtttaaaaagaatttatatttctcctcattcttacaaataagattcaagtttaaactcaaataatgtaggaaatcattttttttaaaattgttccctactgtgtctaggcttgagaccacaggtaattaagaccaggttttcatttgatatgatttttatgagttctttttagaggttaggtaggttaggcacaatttttatttttaaaaagcgggttattatgagaggagaaatcatactttgtcatttgaaaatgatgccataagaggtgttagcagaaaaatcaaactgtaaaatattttagagatttattctgggccattataagtgactgtggccccactgaaatgagtgagttccctgatcctctcacagagcatgcgacaggggtctggctcacctgttcagttgccccactgctcaaacccctagggggagaatacagacagtcaggtgcagaggctggggcaagtgctttggccccttagccctgcagtagtgtctaggggtggggtgcccgcaaccccagtgttacaaagttctttcagctttgcagtccacagacagctggagtgttaatcagctcaatggaccctctgccttatagcaagggcagaaggccagagtgacagctttctgtattccaagctcttgcccagtgtcctagaaaaataagatcatacagggctcgaaggacgagtgcagggttttactgagtagtggaggtggctctcagcaagatggatggggagtgggaaatggggatggattgggaaggtgaacttcctctgaagtccagccacccagtggctggactcttcaacctcccccagccaagctcctctcagcgcccagatggtcctcttctctctctctctctctctctgccacatcatttcaccatctgtctgctggtcagctggcttgctggtgtgctggtctgttggtctgctggtctgcttctggaacctgggcttcagagtttatatgggtgcaggatagggggtgttttgggccaaaaggcagctttttggacatgaaaacggaaatgcctgttccatttagggttgcaggtcttcaggcttgagggtgggacctttgcgcaggaactaccctcttctacccagtgtttccctgtctcctgtccatatcaccagtatacacagtctcaaggagtcctgagaaagtgtgcccaaggccgtcagattcagtttggttctgcatgtttcagggaggcaggagttacaggcaaaaacataaatcagtacatggaaggtatacattggttcagcctgaaaaggcaggatatcttcaagtggggacttgcagggcatagtttggttcagagattctttaatctgcagttggttaaaggaacaaaactttgtacaaaagcttagagttagcaaaaagaaatatttaaattaagataaggatgctatgtcagagtcagccacaaaatgacctgtttagcaagattaatggcctacaggtgtgacttaacccttgccttgcatggcctaaggtcttgtttataatttagtatcttattgcccaaagagtctattttgtcggtcttatgatctctattttaacattaatgctggtcacttgtgactaaactccaaaggggaggcatatctgacttgccttcccattgtggccaggaacccaagttttcaagtttctctggagtccccttggccaagaaggggtccattcagttggtttggggagctgaggattttatttttagtttatacagggtcgtatgagattgttaggacaggaatgactaatgttttcttctctttctgtttcagccacagcagctatccttagcagagcatcctggagtctgcaaagtgttaatccaggcctaaagacaagtaagaatttcagttctttttcttccttcaatgatattttccatgttttagtgtaattaagctactatccttctctgttttatttgggatgttagtaactggaatagtgactgagatgaaattttataggcaagcaaaacattttttaaggatttgtttcttaacttctgatatagtttggatgtctgtcccttccaaatctcatgtcatccccaatgttggaggtggagcctaggaggagatgtttgggttatgtgggcagattcctcatgaatggtttagcaccctcttctttgtgctgtcctcaccatagtgagtgagttctcatgagatctggttgtttaaaagtgtgtggcaccccctcttcaatctcttgctcccactcttgccctatgagagacctgttccacttcaccatgattataggcttcccgaggctttcaccagaagcagatgctaatacagcctgcagaactgtgagccgttgaaatcatttttctttataaatcacccagcctcaggtacttttttatagcaatgaaaacaaactaatacaacttctctgcaaggctgctttttctatttttgcttatgcttagaggttaagtaaggccaaattaatgaaggaggaaaaaagaggaaatgatacatcatggatcaacaattatttattgaatttaggaaactgcctctttttacaaattctttttaaaattattatcattattatcttgaagtatttatctaaggattacattgatagaaagttaaacttgtctctccaaccagattgccttaagcttcagaattatgccttcttgtaagctccttcttactcttaaaatgactttacacattcccccctggtcctttgacaatctcctcttcagtcacaggacagaaccccaacatcaactctgtggggaagcttctccaaattctctaggcctgaacaattttctgccttctctgcttccgtggaactttgtcctttactacatgatagcgtttacctcctgacattttagtgtgtttgttagccctgcatatagaactcaccagattgtgtggactgcatgaatgaattaattctattgaactttaaggcaaagcctaaattttatgcttcttctaaatcccttacatctcctaaaaaaaattctgatccatagtagtaggtacttgtttaattaaattttagggatggatgtttttcatcagtggaagtatatgctagagtccatattatgcaataagggaagggaagacagagtacctaattcagttaagatattgctattcttgttagtaattctggagtcatgaaatcataatttgaattttatgactaaattgcagaataaatttccaatgtgagatttaaacattatttccttggaggtgaccaaaaaggagagttggtactgtttttaagaactgtcattcaattgtcagttgtgccagagcacaaatcctttatagccctcctgtttaagaagcatctgacatgctaagctgcttcctaattaacacaaaggttgtaaaagaagtggctgtttggttgtgtttgggttatcccagccagtatattccaaagcttccttcattcaacagatgagtgatctcctttatattctgtaaggaaatgagaagtaatcagttaaacatgcattactaatgctacatgcttcacattgaaaccatcctcctgacacataatactttaccctctgctgtcccccaaagtggcagtaggatttctgttaagtcattttctttattaggtcacaaggtctaagaagcctaaacattgtgccttgttgaaatataacctctaggtatggaggatgtgttgaacaacttcctaccagtcatttggcatatgttgatttcctgtcttcatgatacataagacaactagctaattatcattcatatgtggtaaatcacatagatactgacttcccctatctttccagctttttcttatcaaaagttacctgctttctgtcgcaggaatgattggctaaagtaacctatatcagggtctgtaacagtgggcacctatcagagtgcacatgcttgaacatatcatcgcctttatcatcataagcctcacatccagatgtgatagacccaagtgctcacatcccctcactctgtcactgtatatgttgttaccatatcacaaatatttaacaatctgctgtgtactcaacctttagctgtatgccctgagggagacagagtaagatactgccctgacatcaaggagctcacatgctccctaaagagataatttcacatgaaaagttagtgtttaacatgaaatgtcctgagaatatacaattgtaatttgcatgtttcctatgtgtacttttctaagttctcagattcaaaacaaaaccccatggaagaaaaaatgaaataaaaaccctgtcaggacaaatcctagccagaactgaccaaacataaaaaataaatgccactgccctctccaagccacctttactttatacttgggtctaagaagcccaaacattgtgccttgttgaaatataacctctaggtatggaggatgtgtcgaacaacttcctaccagtcagtgaagtgcagtgaccatttagcagtatctccttcctctctctttccacccgctgccccatctctccttccttgcatctatcttctcctgccaacaataattttcttatgttctaagtaaatatctttaatgctgtccctactacctaaacattaaacttcaaacctttcccaagaccctgaacacccaccccagcttgtaagttcaggctacttacctgggaatcccagacacactgtatattccctcctctggtacactgctcatgtcatcgaatctatcttcctcccaccccgccgtggattctgtaaatatatatcagtcctacccacctttaagtttcagtcaaaacctgatacttacggcctgaagcaatccctctgttctccatgctagtctatgagagaggtcatgatatttcagtagctctggagagacacatatggtcaaaccagaccagctcaaattaacccatgctatgcaccacctaaagaatcacctcttgctgtaacctctttcttcaccaaaaattatctgtcccatttgctaagtaagcccttagggctttgctgtgcctgcaacaggtcttaatccatgtgaatgtgcatttttgtgttagtgagcacatgctaacatgccttccacagattagtttctttagaaacattttctggggaaaaaaaagatatatttttggttagtaaccccaaaaggacctttcagttcacgtacgtgggtagcagcatactccacttacgcaaaggtcagcccagggtaaatatgagcaaaaacacatacttaggataagaagaatgttgagggagtttacagtttaaagagatatccagacaactttttatattttaaagaagtaatgctataattttactacaaagaaaacttctttttgtttctggggagaagaatgagaagagttacaatctcctagagaaaagcaaaacatttttagtactcccaaataagacaggcacctcagctagggtgctgtagttgcacgttctttgtgttttttcaagaattttatttctctgtcatgattatttattggcagaggatttgatgagcatttgggccaaatttataagactttcaacacatatggagaaaaaaaattagatgattgcacatctttctgagggagatttttcccctgttttaaaagtcattgcttttcactgaatttatcatgtattcctataaaagtgtaaattttgtgattgatagcatttttacctcaaaataaaatgaatatccaacaggagcaagttttattgactgcctgttggagcgtaaattagtctaaggtttcatgaaataggcatttgaacatgaatattaatggctgagatcagaggcaacttttgaaaggattccaaaatattatcatattagattggcacagcaaatgaattgcttgaatgctagaagttcacaaacattcaaacaattgtgagttacattaacttcaataaaaacttttgcaggacaaaaatttaatgtagtaaacttcatcttgcttgtccaggtccatatacattcttagctggactcttgtcctagcttcctaatttttcttcctacctcctatttttccctattccaagccaccatacttgctcttgattaattcttcctgcctatctctgatttagtgattcatctgcccagtcatctatagtagctccaaactgttctctaaattatgaataaacttatctccctgacattcagaaaattctacagcattcatcttacacacttttctagccttatctcccttttctcctttgtactcctatgtttatattccctgcattcttgcttcattgtatccatttacattggcccttttaccagtaatttcctcttctttcccctcagtctgaaacagtccttcatagattttgtcctataagccatatttcaaatataactttatccacaaagctttgcccagttacctcaagagaatgcatgcttctgctttagaattgtagcctttttttcctctctcgcaaggagagagtgtagcaccatggttgaagtactcagcctctggagtgagctttagtttaagacccagttctactgcttacttgctatatgatcttatctaaatttgataacctctgtgtcttttttttttttcaaaataaagatgctaatagtacctacctcataagattgttgtgagaattataagtgttgatacatttaaagtagttagaatagtatctggccctatagtaagcttacgtggtatttattgtattctctcatggctcatattttattccaatgtgtattaaattgaactgtatgaaattgcccatgtcaactctatattggaccctaaaatcattatgtcatgtggttcaaccaaatgtagtgctttttgtacccccaccttaatatactgaactatctcgaaagataaggactatatcttatacattgttgtgtcctatggtacctgctgtgtacctaacacatgctgagtattttatggatggttattgaattttgcaaatgacacacacacacacacacacacacacacacacacaaaatgcannnnnnnnnnnnnnnnnnnncacacacacaaaatgcaaaaaacaaatagaagccaagaccttcccagtatcttaagtactctttggctaccacagagtttcctccatgtggttcagcagtcatttatgaaaggagagtgataaagatatacaggaggagaattttatcttgtctattgctgagtataaatactatgcctttcccaaaagccttccacagaacctttccttcaggtcagggacctagtgtcatgggtcggtcttggataacattgcaggacatatcagttcaactgccaagggaatcataaatagtcctactcctgcctgtggcccaccactgcctccatagaaggtacatgaccctctctgctttcattcttttttatcagatattttcaacatcaagaacttattagctgataatgcaactaaattaagtataacataagggaaatgtgtcctggcagggatggtatcttagagtgaatgtacagcctttatttgttacaaaaaaaaaaaaaaaaaaaaaaaaaaaaaaaaacttgagctttggacaagcaatagggagcagcattgatactgggttctgacatggaagctgacattaaattcttgacagtctgcttgtttataaactattcagtaaacaatttagtaagtaaacatagattcttgctatctcttttaaggaaagagtggttatggtggctttctcttgtacccaacctagtgctcagcctttcctgactcacataagcactaatctccagataacaccaaatgtcctagggttattatttatcccccttccttgttctctgaaataagaggaaggcaggtaaaattatgcactttatgtaagaagaaatagaggtacagagaaaacagcttaagtctcttaacagcccaagagagtgaagaagatattgccagtgcagtgagttgtatctgtccctaggtaagcaaaatattaataaaagcatacaactatgttaataattcaaacagtctttacttatatggactttgcagtgacttttttccagcctgaaatactcagataatgactgccattagtttcacacgttagtgctttattatatactgctttgctttcacacgaaattgttgggagataagaattttatgtaagataaatattgggtcttaacttttttataccccttcaacttcaagcaattttctgagcaatggtaagtggtaaatagatatttaccacttaagtttacaagagacctgtttctctctgttcattggcttaggcactattaatgaaacctttggaatgcaggtcccttctggttgtaaacatatatcgaggtcttctatttcttttggaactcaaacaataagaaaataattagaaatctgtgggcataggtctctagaagccttaatcttagaagtgagtaaaacaaatttttaggccaggctcggtggctcacgcctgtaatcccagcactttgggagaccgaggcgggcggatcacgaggtcaggagatcgagaccatcctggctaacacggtgaaaccccgtctctacttactaaaaattaaaaaaattacctgggcgtggtgacgggcacctgtagtcccagctactcgggaggctgaggcaggagaatggcgtgcacctgggaggcggagcttgcagtgagccgagattgtgccactgcactccagcctgggcgacagagcgagattccgcctgaaaaaaaaatattttttttgtaaagcctaggaaggatgattaagcatcttcctaaaattttcagtatgcctgtgtacactgtatatactgacttctagcatggtttctttgccaaagcataacacatagtttttaaagggataattcaagaccaacattctttcactctgggtgaccccaatgggtggtgaacaccttttagtaactcttgaaagttaaagcatccagcagttggttgtgacctttttggttgtgacctttgagttattctagcttgtagcccactgacttgctgctcagttccacagcttcaaaaccagctctaatcactgctcccaagagagccctagcttctgcatacaggaggctctcaccaggaaaggatacctgaagtccagaaagacactctgtccacactggctcctccttgtagggaacagttttttcaaataatgtacatttatgcactgggaaaatatcttgaatttattatttaggtgtaaccagactttaatacaacttaacctacacactgggaaagcagactgtacaccacatttacaaaaagatttatggctttaacaacgcattcaagtgtagttactgctaaatagcagttcaagtaattgtgtgtctcatggcaaatatatgcaatgtaaggtaatatatatttaaaccaaaaataacaagaggtgattatttgctaaataaagaacttattacttaggaaaaaatgttatacaactttcaaaggacttttaaaaatataatatgatttataggaaatttatttgcgtataattcacaatgtctggtacaaagtaagctacctctgtgttttttttttctttaggtcaacaaatatttaaaccaagggttggcaaactggccctcagaccagatgcttatttttgtaaataaagttttattggaccacagccatgcctgtttatttcagactgtggctactttgaggctacagtggcagagttgagtagctaagacagatcataggtccacaaacctaaaatctttactctctggccctctaaaaaaaaagtatgccaaaccattctaaacagaaaaacaattaattctttttttccaacttttattttagattcagggagtacatgtgcaggtttgttacatgggtcaattgcatgtctctgaggtttggtgtacaaaaaatccccttacccaggtattgagcatattacttgatgtttttcaactgacaccccctcccaatcttccccactctagtagtcctctgtgtctactgttgccatctttatacccatgtttatccagcatttagctcctgcttataagtaagaacatacggtatttggttttctgttcctgcgttaattcacctacaatgatgacttccacatgcatccatgctgctgcaaaggacataattttgttcttttttatggctgcatagcttttcatggcgtatatgtaacaaattttctttatccagtccaccgacaatgcgcatctacgttgattttatgtttttgctattatgaatggtgctgtgatgaatatatgagtcatgcgtcctttttgtagaatgatttatttttctttgggtatatacccagttatgggattgctaggttgaatggtagttctgttttaatttccttgagaaatctccacactgttttccacagtggctgaacgaatttgcattcccacagcagctataatatggttgtttgtttgtttgtttgagacgggtctcgctttgttgtctaggctggagtgcagtggtgcgatctcggctcactgcaacctccgcctcccgggttcaagcaattctcctgcctcagccttttgagtagctgggattacagatatgcaccaccacgcccggcaaatttttttgtatttttagtagagataggggtttcaccgtgttggtcaggctggtcttgaactcctgacctcgtgatctgcccccctcaggctcccaaatataatatggtattttaaggaactaatcatcaagtttgtattggttaccatcttttagtctcctgttatcttcagtttcataattggcattaatgacaatatggtattcactttataaatttgcttcatagtaaactcttctgaaataaattacagtcatgcatcacttaacagtggggatgcattctaagaaatgcataattaggcaatttcatcattgtgtaaacatgaagtgtacttacacaaacctggttggtacagtctgctgcacacctagcctgtatgatatagtctattgttcctaggctacaaacctatacagcatgttactgtactgaatattctcagcaattataacacaatggtaattatttatgtatctaaacatagacaaggtacaataaaaatatggtattgtaatcttatgggacgactatcacatatgcagtctgtcattgaccaaaacatcattatacagcacaagactatagttgaaaattttaaattatatatatgggttgcattgtatttctgtttgccgcattgatatatacatttaatggtttgtatgtttgtacttgcattcatatacattaaactgttacagggagcatatttgcttgtgttaaaaaataaataatatttatttctaatgacttataaaattattatggttatgtttaaagaggcttgaagaggtattatggttatgtttgaagaggcgacagaaacatcacctttgtcattgaccaaaacatcattgtgtggctcatgactgtaatagtgtaaagtaaagattaactgtattggctaatcaatgtggacatatcattcagtattactaaagattctccatccaatgaagcctgaacacctgtaaatgcttggtgatggatggaaagggcaattatttgcagctggactgtctgagacatgtcatcattattgcataatatttatttaacgaaggatcaatgcaccgtacagctccagtttgagggcacacttgacattgtagtttgtagatcttttataaactgactgctatcactgaagttttgctgaagaataaagacaaaagattctctctttaggaaattgtgcactttaaagactcagaaacctgaaacctcacagaatcataatagatgtatttttcagagacaatttctgagtccttggcgtattctcaaatgtcattcatgtcttcactgccgcaggttatctttttatttttatgtgtcatggaaaagcagcctttttctttttttctctcttactatgccttaataaatagaatttaaaaccccaaatctgaattattgtgaaagccaatatttgtagcaaatccatctatgctctgtgttgtcagcacatatggttttgtgcacctgctaccatgaaattctgccagggttatcctcagagaaatggagagacacctgatgccatccttactgtgacagacgtttttctttctgtgaattccaaaaatttttgaagttatgcatctcttgcagtgaacttcagtgacttgtgtacacatggtatcttcctttctagattgtaagttctttgagggcagggactgattctttctcatctttatatgctctgcttctccactcttggtttagccagagccttacacaaagtagaagcttaaataatgtttattagatgaatatcatactgagttccagaaattacctgagagcaattgaagaaggaaagtgtggagggagaggtgttagcatagagttcatagtgtctgagtttggcatccttttcctcaacacgaatactaacacagataagtaacctaactgtcttctcaaatctgagaggagtagatgcattttctcttttaggacttttctatctcatgtgggaaaagcaaacaagaaggtcctacaaaagtcttgtaggtatttattcttatccgacagtggtggatgtgacaaactctcttattggtttcagttggtcccacaggttatgtgatgaggactttggggtttggggagctgggaaccatgagttgtctcttatggatgacctaacatactgctaatacctgacaagcttcaatttatccatctcgaaatggagatactaacatctgtctcaaagggtcattgtgaggagcaagtaggaacatagaaaatttcctagcacaaagtagatatggaagatagggagtaagatgttaggtattttattgcttctactgcttctgctgctgttactactactgctattattattactactcctggaagagtaggacttcctgggacactgaccctacttaccccttcaccttattcaccaaaacttatctcctatataaattcatttatatttttctggaatgataagaaaaatccttcatctaggtagcatattttatatttgaatagtttatgtttcaaataaataaagtttttacaaaccccagagaaggcctatacagccaaatttgaaaaaaaaatttaaaaataaatattcagtgtttcagatgtgtgtgtgtgtatcttttaattgccatgtatttctaccaaaaaatacaaaacttaattttgtatcctgaaagaccctcatttgagaatccctgcttttatgttctgccatgaccactttagtccaggcaacagatagcttaggttgttgctttacaagtggagaaacagggctgagaggctcgccatactccaaattaccagtgccagtcccatggcacaaagacatgaaaggcaggcacccaaacagaaaggtagtgcaattaattgcttcaaagtcttcactcagggctgcccttaggcatgatcagataaaaatgtacacattgcttggcacctggtaaaatgttgtttcctttccttcctccttcccctgatagactcttcttaggtacagaaaagatgaggctgcacacatagctaaaagctatgccattaaaacaaacttcttttttttttttaatttatttattattattatactttaagttgtagggtacatgtgcataacgtgcaggtttgttacatatgtatacttgtgccatgttggtgtgctgcacccatcaactcgtcatttacatcaggtataactcccaatgcaatccctcccccctcccccctccccatgataggccccggtgtgtgatgttccccttcctgagtccaagcgatctcattgttcagttcccacctatgagtgagaacatgcggtgtttggttttctgttcttgtgatagtttgctaagaatgatggtttccagctgcatccatgtccctacaaaagacacaaactcatcctttttgatggctgcatagtattccatggtgtatatgtgccacattttcttaatccaatctgtcactgatggacatttgggttgattccaagtctttgctattgtgaatagtgctgcaataaacatacgtgtgcatgtgtctttatagcagcataatttataatcctttgggtatatacccagtaatgggatggctgggtcatatggtacatctagttctagatccttgaggaatcgccatactgttttccataatgggaatttccataatgggattccataactagtttacaatcccaccaacagtgtaaaagcgttcctatttctccacatcctctccagcacctgttgtttcctgactttttaatgatcgccattctaactggtgtgagatggtatctcattgtggttttgatttgcatttctctgatggccagtgatgatgagcattttttcatgtgtctgttggctgtatgaatgtcttcttttgagaaatgtctgttcatatcctttgcccactttttgatggggttgtttttttcttgtaaatttgtttgagttctttgtaggttctggatattagccctttgtcagatgagtagattgcaacaattttctcccattctgtaggttgcctgttcactctgatgnnnnnnnnnnnnnnnnnnnnnnnnnnnnnnnnnnnnnnnnnnnnnnnnnnnnnnnnnnnnnnnnnnnnnnnnnnnnnnnnnnnnnnnnnnnnnnnnnnnnnnnnnnnnnnnnnnnnnnnnnnnnnnnnnnnnnnnnnnnnnnnnnnnnnnnnnnnnnnnnnnnnnnnnnnnnnnnnnnnnnnnnnnnnnnnnnnnnnnnnnnnnnnnnnnnnnnnnnnnnnnnnnnnnnnnnnnnnnnnnnnnnnnnnnnnnnnnnnnnnnnnnnnnnnnnnnnnnnnnnnnnnnnnnnnnnnnnnnnnnnnnnnnnnnnnnnnnnnnnnnnnnnnnnnnnnnnnnnnnnnnnnnnnnnnnnnnnnnnnnnnnnnnnnnnnnnnnnnnnnnnnnnnnnnnnnnnnnnnnnnnnnnnnnnnnnnnnnnnnnnnnnnnnnnnnnnnnnnnnnnnnnnnnnnnnnnnnnnnnnnnnnnnnnnnnnnnnnnnnnnnnnnnnnnnnnnnnnnnnnnnnnnnnnnnnnnnnnnnnnnnnnnnnnnnnnnnnnnnnnnnnnnnnnnnnnnnnnnnnnnnnnnnnnnnnnnnnnnnnnnnnnnnnnnnnnnnnnnnnnnnnnnnnnnnnnnnnnnnnnnnnnnnnnnnntgagcagtggtttgtagttctccttgaagaggtcctttacatcccttgtaagttggattcctaggtattttattctctttgaagcaattgtgaatggaagttcattcctgatttggctctctctttgtctgttactggtgtataggaatgcttgtgatttttgcacattaattttgtatcctgagactttgctgaagttgcttatcagcttaaggagattttgggctgagacaatggggttttctaaatagacaatcatgtcatctgcaaacagggacaatttgacttcttcttttcctaactgaatacccttgatttctttctcttgcctaattgccctagccagaacttccaacactatgttgaataggagtggtgagagagggcatccctgtcttgtgccagttttcaaagggaatttttccagtttttgcccattcagtatgatattggctgtgggtttgtcataaatagctcttattattttgaggtacattccatcaatagcgaatttattgagcgtttttagcatgaagggctgttgaattttgtcaaaagccttttctgcatctattgagagaatcatgtggttcttgtctttggttctgtttatatgctggattatgtttattgatttgcgaatgttgaaccagccttgcatcccagggatgaagcccacttgatcatggtggataagctttttgatgtgttgctgaatccggttttccagtattttattgaggatttttgcatcgatgttcatcagggatattggtctaaaattctctttttttgttgtgtctctgccaggctttggtatcaggatgatgttggcctcataaaatgagttagggaggattccctctttttctattgattcgaatagtttcagaaggaatggtaccagctcctccttgtacctctggtagaattcagctgtgaatccatctggtcctggactttttttggttggtaggctattaattattgcctcaatttcagagcctgctattggtctattcagggattcaacttcttcctggtttagtcttggaagagtgtaagtgtccaggaaattatccatttcttctagattttccagtttatttgcatagaggtgtttatagtattctctgacggttgtttgtatttctgtggggtcggtggtgatatcccctttatcatttttaattgcgtcgatttgattcttctctcttttcttctttattagtcttgctagtggtctgtcaattttgttgatcttttcaaaaaaccaactcctggattcattgattttttggagggttttttgtgtctctatctccttcagttctgctctgatcttagttatttcttgccttctgctagctttcgaatgtgtttgctcttgcttctctagttcttttaattgcgatgttagagtgtcaattttagatctttcctgctttctcttgtgggcatttagtgctataaatttccctctacacactgctttaaatgtgtcccagagattctggtatgttgtatctttgttctcattggtttcaaagaacatctttatttctgccttcatttcgttatgtacccagtagtcattcaggagcaggttgttcagtttccatgtagttgagcagttttgattgagtttcttagtcctgggttctagtttgattgcactgtggtctgagagacagtttgttataatttctgttcttgtacatttgctgaggagtgatttacttccaattacgtggtcgattttggagtaagtacgatgtggtgctgagaagaatgtatattctgttgatttggggtggagagttctatagatgtctattaggtctgcttgctgcagagatgagttcaattcctggatatccttgttaactttctgtctcgttgatctgtctaatgttgacagtggagtgttgaagtctcccattattattgtatgggagtctaagtctctttgtaagtctctaaggacttgctttatgaatctgggtgctcctgtattgggtgcatatatatttaggatagttagctcttcctgttgaattgatccctttaccattatgtaatggccttctttgtctcttttgatctttgatggtttaaagtctgttttatcagagactagtattgcaacccccgctttttttgttctccattttcttggtaaatcttcctccatccctttattttgagcctatgtatgtctctgcgtgtgagatgggtctcctgaatacagcagactgatgggtcttgactctttatccagtttgccagtctgtgtcttttaattggagcatttagtccatttacatttaaagttaagattgttatgtgtgaacttgatcctgccattatattaactggttattttgctcgttagttgatgcagtttcttcctagcctcgatggtctttacattttggcatgtttttgcaatggctggtaccggttgttcctttccatgtttagtgcttccttcagggtctcttgtaaggcaggcctagtggtgacaaaatctctaagcatttgcttatctgtaaaggattttatttctccttcacttatgaaacttagtttggctggatatgaaattctgggtttaaaattcttttctttaagaatgttgaatattggcccccactctcttctggcttggagagtttctgccgagagatctgctgttagtctgatgggcttccctttgtgggtaacccgacctttctctctggctgcccttaagattttttccttcatttcaactttggtgaatctggcaattatgtgtcttggagttgctcttctcgaggggtatctttgtggcgttctctgtatttcctggatttgaatgttggcctgccctactaggttggggaagttctcctggatgatatcctgaagagtgttttccaacttggttccattttccccctcactttcaggcaccccaatcagacgtagatttggtctttttacataatcccatacttcttgcaggctttgttcatttctttttcttcttttttcttttggtttctcttctcgcttcatttcattcatttgatcctcaatcgctgatactctttcttccagttgatcgagtcggttactgaagcttgtgcatttgtcacgtatttctcgtgtcatggttttcatctctttcatttcgtttatgaccttctctgcattaattactctagccatcaattcttccacctttttttcaagatttttagtttctttacgctgggtacgtaattcctcctttagctctgagaaatttgatggactgaagccttcttctctcatctcgtcaaagtcattctccgtccagctttgatccgttgctggcaatgagctgcgctcctttgccgggggagatgcgctcttattttttgaatttccagcttttctgccctgctttttccccatctttgtggttttatctgcctctggtctttgatgatggtgatgtactgatggggttttggtgtaggtgtccttcctgtttgatagttttccttctaacagtcaggaccctcagctgtaggtctgttggagattgcttgaggtccactccagaccctgtttgcctgggtatcagcagcagaggctgcagaagatagaatatttctgaacagcgagtgtacctgtctgattcttgctttggaagcttcctctcaggggtgtactccaccctgtgaggtgtggggtgtcagactgcccctagtgggggatgtctcccagttaggctactcaggggtcggagacccacttgagcagggagtctgtcccttctcagatctcaacctccgtgttgggagatccactgctctcttcaaagctgtcagacagagtcgtttgcgtctgcagaggcttctactatgtttgttattgtttactgtgccctgtccccagaggtggagtctacagagacaggcaggtttccttgagctgctgtgagctccacccagttcgagcttcccagcagctttgtttacctacttaagcctcagcaatggcgggcgcccctcccccagcctcgctgctgccttgccggtagatcacagactgctgtgctagcaatgagggaggctccctgggcgtgggaccctcccggccaggtgtgggatatgatctcctggtgtgcctgtttgcttaaagcgcagtattggggtgggagttacccgcttttccaggtgttgtgtgtctcagttcccctggctaggaaaagggattcccttcccccttgcgcttcccaggtgaggcaatgcctcgccctgcttcagctctcgctggtcgggctgcagcagctgaccagcaccgatcttccggcactccccagtgagatgaacccagtacctcagttgaaaatgcagaaatcaccggtcttctgtgtggctcgcgctgggagttggagactggagctgttcctatttggccatcttgctccgcccccaacttctttttcaaagagcaccttcaccccttactggactaaagtcaatccgaagctcttttctctaagctttataacacttactgcctggatgagtcatttgtcaataatacagactatttgtattggtgggtttcttgtatatatgtacgagcccctagagtctctaacttaaaatttatttttgctttagaagttcaggattaaggaggctatgatgatcaattttaacaacctcaataaataatacagtaactaatggttaggtatccaggctagcccagggcagcctgtgtgattcatgctgctggtgaactgtggctggctgggtaaactagatctgaaattctgtggtgcctaagggagggaagggaatatttcccacactatctcatcctgccctcactatccctacccgcaatctctctctacactctaccccacctaccctgctttttctgtgaaagaccagctggggcaaatattttggattaagtaaaatttgtcttgggtaacttcccaaaaatttagtttttaactgaataatcttggttaatccatgagtaaataaccttgtagactatagtcagcctcactgtgagaagctgacaaattagaacaccagaggaatatacaccaattccttcctgccctgcaaacctctgcttcttgaggtttattaagagtgggtgcctcggccgggcgcggtggctcaagcctgtaatcccagcactttgggaggccgagacgggcggatcacgaggtcaggagatcgagaccatcctggttaacacggtgaaaccccgtctctactaaaaaaaaaatacaaaaaactagccggccgaggtggcggacgcctgtagtcccagctactcgagaggcggaggcaggagaatggcgtgaacccaggaggcggagcttgcagtgagctgagatccggccactgcactccagcctgggtgacagcgcgagactccgtctcaaaaaaaaaaaaaaaaaagagtgggtgcctcattgattagtcattagttattgacagaaccagagagatatgcctggctcctcttggaaaaaaccaaaagactgaaagggaaaagtacatcagaaagatacccaaggaggcagactgctataaggaaaataattaggagaagaaatcatatgttttcagatgaatagaatctggggatgaaaaaagcagccttttcaggcagatgatggaaagatagaaactaaattcagaaggattagaagatgattagaaggacaagaagccacagaagaccaagatttctcaaattaccaaaagaaggtaagcctagccttgttcagtctgcagaatgagaactcccttctagtagatccgtacaatgaatttcacaaaggttgatttccctctctcctctttgagcccataatcacctccttctacgtgcacaaccttgaccatcaccactacctataacaaataaccagttcttatgatcccctcaaggcataacacaaaaatattttctttgtgattactttctctacacaaaagagagagagagagagagagagagagagagagacagagacagagacacaagtcaggggacttcgttggtgagtttagaccacagcaagaacctaaaatcctagtgggttgtcaatatagacaggctgaaaccactaagatcctgagtggtggttctaggtaggtatgcccatcagaaccatctgtggataagtattctcagtaaatacacatgcaggacctctacctcagatgtactgaattgaacttcactgctggagctcaggcatttcatatttgtttcctaagctgctataacaaagtaccacaaacttgatggcttaacaagagaaatgtattctgtcacagttctggaggccagaagtccaaagtcaaggtatgaccaggactggttccttctggaggctctgaggaaaatctgttccacacctctctcctaggttttggtgactgccagcaatctttggtgttctttgatttgcagaaacatcattccaatctctggttctgtcttcatttgactttccctatgtctgtgattggtctcctttctgtctcttataaggacacctgtcactgaatgtagagcctatcctaatgcacaaggagctcaattataccttaactatatctgtaaagaccctttttccaactaaagccatattcacaggtaccaaggtttaggacttggatatacctttggaggatacagttcaacccattatacatatgtattgaagggaaaaattcacaccacaactgattctcctgtaaagaatgttggccttaatgcatttaacacaccatttctccagcacttaggaaatgctaggacatgcaaagctaaagctaaataggcttctttattgcagaacctctcagaggctctcatctgtttgtgtgcattataaatgtccaagagaaaaaaaagaaccataacatttcctggaaatagtcgaccagggaacgtcttttcaagggattacctattaactacctcaatggacactaatgactaaaggaatacaggctgctggtgattatggcacttccaaagtatgctcaatggtgtgggcatgagtctaccacagtgtataaacacttagagtgttaatgtctacactgacctctccctggatatgagcacacatccttcatcaaatatccacagtggtttccctagaggatttgcatatgcgcatggaattttagatgtctagtctctactcttgccttcagccatttttgtagagagaaattggcaaaatattagcatgcatggaagggaaaggtggccaagataatacattatgcctttttttccccctgaaaattgcccagaatatctgaaaagggagaagtggcttaatcatttctattcccacaattctgatcctacaaaattgatatcagtatatgattcatccagaagttcacagtggtatttttttaaaaaacacttttagaggttaccagggcatctcactgttttaaaatttaatacctcaagggaagtaagcaactaccttgaatttttgcatgaattgcattcaagaataactgaatagttcgtggaataaagttgattttttaaaagtaggcatattctagttaataaatgtaaaagaaatggtaggattacaaaatcactacattacaaactctaatgacataatagatttaagcaaaatgatcagtgaatgataaaatatttaggtatgctctcttccaggtgaatcaagctgacaataccttggacccacattagtcttaccacatgatattatatgtctcctgatacttaaaataaatatcaaataaatgttgataattgttgaaacttggtgatgaacatatagttcacagcaccacccgtgatggattctttccatgagaattgatctgaatcaaagcaagcctctcggtctaactgccagtgtataggaaataaggatacagtaacatttttaaagtctttaagaatgcagtaagctgaaagaaattggtttctgcaataacagcaacaaaattatgtaataaaaagagagagggagaatcatggatttatacaaacttaagagacgttgtgttaatctaatgtgtatcctgatcaaacaaattaactgtcaaaagatgtcttttgagatatgttaggaaatttgaacataaactaggtattctatgatattcaggaatcatcgctaatttgttagatacgacgttggtatgatttttttgaatgagaaagtttttagcatcactaatttgttagatacaatgttggtatgatttttttaaatgagaaagtttttagcttttagagacacatacctagatagttatggatgaaagcatgtgatttaaaaaaaaaaaaaagatagtggaagtacacagaacaggattgctaaatgttgataattgttgaaccttgatgatgaacatataggaattaattaaaccatattttctatttttttgtttattttgcaaattcaaaaataaaaatagaataatccctcatgaacagatggcctcaactttcatccccaagtaaacacaattcacattctcagtggaacccatgagaatattatgaagtatatgtctatctcatttcattatatatggaatcttaccattccctttgtctttattactagtggccagagttctatcttgaaatgtgggaaatgtcctatatgaacaaattagtttaattactgtgagaaaaccagaaaatatttgagttctagctaactggatattgaatgagttgtgctgaagtatgtggtcctgaagggttgataatgaaatatttgctttccagtggcaaggaaaaataaatgtcttagctagaatttacaaggtcattcttgaaatcaatcaacctgggctgaagatttcattgctgctgttatctggcatgatggtattgtttgtgcacagttctgttgatgtgagctatcaaatatttcttagaactgaaatcatataatagcaaacactgctatgtcccaatggagattccaagactcttttaccatggaacatttacattctatcccctttcatcactgctgaacaaacaaaaacaaaaaaaggaaagataaccaataagctttttatttaattgaaaaccaaagagagagagaggaaagaaccagttagttgccattttctaaatgcagacttttgtttctttctgccttccaattctttgctcttgaagctatagctttcaagcttgtgtataaaggcccagagagaacatttgaaatgtggccaccctacccatgtccatgccactcttcctgcctttctctctgcctacttctgctccaccatcccaggtcaggggctgggaggctgatagcattacaagtagtatagtcattcaagctcatataaacaagatgaaatccaaataataacaaaaagtattttatttcaagtactactcagttccttcagttttgctgaccgatttctaggagacctaggctcagctcttggttgtctcagaactgaggacagtactcatttgcaccatatgcatctgcttgttagcctatgcaaccaaaattgattcattacttggccttctctgaaaagaaaaatgaaaaaaaatgcactcttaaaaataattcttaaaatacaaccaggaggcatgtgcctagacatggctcaccttccaccaaatcatactttatgatttcccacaatgttaccttctattcctcctgcccctaaggttctatggagcagagcaggttgaagaatgttaaggttgtactaaactttttagaatagaggctttggggaagcaaatgagaggtacactgaaaatgaagtatctgtctctgctcctattaatgtcacaggactagaagttgacctcatagctgattagagatggaccctgcaaattgaaccccagcacatgcctctcattatccattcttctctttgcagaatggggtccatgctcacatatcaagaaaatggtgggtttcagtctggctcactgggtgaggttttggcatgcaaactaataagagttagtgtacatcacccataataaaagtaaaagctttatttttatttccccaggtaaataagcaaaagacagatctaaaatacattagagttaagttccatggggacagaaatgtctgctttgtttgttgttgtatatttgacacctagaatggtggctggaccatagtgactacaaataaaatatttcctaagggaatgaatggttctgcaggatagatgttctctgcatttggataagtgatgatactatagactcagagcctagatagaaaatattgtcccactttcagttctgcaagttgacttgaggtgcttggcgatgtcctgcagcaagcaaacccaatgaaggcatctctgagaccccgtagtcaccaccgctagcctcccattaccttgcccaccctagattttcaaattgggaatcattgtggtaccagattgggaatatttgacttgcatactttctcatattggggcttaggattttgagatcttacttccttttttggcttcttgagatctgaaattgttgttcagagaagcgtattaagacaatgattcttccattaccatgcatttctgttaccaacagaggaggtaagtgaatcacttaaaatgatacaattccatccacttcagtacgctataaacatatccttagctttgactataattatagtatgtgggtgatgctgctgagaaaatggtataattataacattatggttgagaattgtctgagtagaaagcactgagctgtactatgcaaagtttaaggcagcattatgggtcccttttcaatatgaataaaattgattagccaattgcaactgagagctttgtaaaatgatattaataatataaaaatcagctgggcgtagtggctcacgcctgtaatcccagcactttgggaggccgaggtggtggatcacaaggtcagaaaatcgagaccatcctggctaacacagtgaaacccgtctctactaaaaatacaaaaaattagctagctgagtgtagtggcgggcgcctgtagtcccagctacttgggggctgaggcaggagaatgccgtaaacccgggaggtggagcttgcagtgagctgagatcatgccactgccctccagcctgggtgacagagccagactgcagtctcaaaaaaaaaaaaaaaaaaaaaaaaaaaaaaaaaaaaaaaaaaaaaaaaaaattcaggggccaaggtaaaaatttaggaaaaatttgatacttttaatttcttttacttataggagtcttgtatgcaaccctaatgcaaagtaaagaagctcaccaacttgaaggaagcatgaatgaaattacaaggaaaagctagcttaaaaaaatcaaccctgttacttggtttttcccctctttgctcttggcaaaaggatcttacatatgtataccaaatgtctatttgaaaattttgtttccctgaatatagatttcttttctctttaacagactgatccaatggttgtagattttatgctaccataaattaaagaagacagcattctatatcatgactgaggtgttaatgacattatgcagttgtcacattttgaaatataaacttaaatgtgagcttttcactgtgtgtaaagtttatctgtattaaaattttttttttaaataccagagatttcagcaacaagaaacataaagaagtaaaaagtacatagaaaccctgtcctagaggacctgttccgccacttaaaagccatgtacctcttgaagcctgtttcctttatttccaaaatgggaatttttatatttacaccctaaccatcacgtgggtcacatgtgataacaatgtgcaagtttcttacaagtgttctagaaatctgtaagtcttagagttctgaggtttactcccaaagaagtggaaattgtgggttgcaccaaacagttaaacagggtgacagggaacccctgtcacgtacccaggcctttgggttattttctagggtgagggaacatggccagtagtacaaagcatgtgagtgtgtggatgtgggtatctgcagtggatgagtgggtgtgtatgtttatgtacaacacatgtgttggaggataaaagggaaaataatttgtctttgtgacttcatctctattcctggcttggaatgttattcctctctacacaaagcatcaaaacagaaaccccttcccttctttattatatcggaaatctggaaattcagttatccttgtcttatcctactccctgctctgttctaaatatataataataataataataagtaatagcactagtagtagtagtcgtcgtcatcgtagtagtagtagtggtcgtagtagtagtagtaagagaatgaagagatggaggagaagaattggaaatagggaggtttcctgtacctgactggcagtttatatagcaaccgcctgcagatttaggtcgtttcttacttcgcttattttacagcaacctcaaccaactgtgacaacctgcaatatctttagcccttaagatactgtctcttaaacctgaccaatatttcttatttctcaaagagtaatgacaatcttttctgtctgagaacttctaaagccacaattgattttcctcacatttccctcaaatgaaaggagtatttgaaaaatggaactcaaaggaggagccacctcagaagcctaactggagcagtcagactctgcatcaacagacttggcttcagttctcacactgatacttactagctgtgggatttttggacaagtcacttaacccctgagtctttagcttctcatctgtaaacaagtataaatactacctacttcataagctcgtatgaaaattcccacaaagtatgatgttagtttcctttctttttgtgctcagctctaaaaatatgcagtgtagtaagtcatcaatatttcattaacataagggaaaactatatacccaacccaaaagctgagattcttcagaacattttttttaaagagattctaattgggaattttataaatggaatacagagtactttttaaataataataacaatgattaatttaaagttactaaacaaaataccttaatgaatttgggaaaaaataagctaaagataaatattaagcaaaagagaaaattattaaagtaataatgtacaagtcacttgatacttgcaaagtaacacagaattagacataaagccacattcaagaggcagcaaagccaaaatggctggctggccccgtttgaaaggctcttggcaacagacatacggaaaactctcatctctttcctgggccttacttcctactctggataagcagcatctttcacacaaaagaacatatccagaataactaagaaagagatgaaatgatttatcggaactagttaaaataattaaatcttaaaagcatgttcccctggacatagagtggggtgatttctgcaaagattttgaaaataaagtacccctaaaacaaggatttggtttaactgcttgaaaacaatgtgacaggttgagaaaactgaaaattttcttaaaatcttgtttacttgaatggtgagccagccatccaggggagaaaccagagctctttccttaaagaaatacagacttccgttggaagaaaaaagttggtaggttttaaccttcaaccttctagtgaagtgagaatattgattgagcatctattactagaataaatttatcttaagtgacccagggaagggtcatgggtgataggaactgtcagagagaaaaaaaatacatggttgtggatcttaagtacttacaatctactgagggctcttgtctgcattttccttagatcgtgatgttgctcaaagtcacataagaaagcacataaatttactgaataatattaagaaagcagcagtgacactgaaatgcttgcattctgttcactatcccagtcatctgcagttgcctgggggatttgcaagcaaggacaggaaaatgctagtaccaaccagttctagataatgaatttatttgctgcaaaaactttcactgtattaaattaaattagattgactggaattaaaaggtaataaggcccattttcttatgtaggtcatcaattactttaactctaaagataattccaaaagaagaggtttaaaaatcgtttgagtagtagtaacatcattggaatttatttgaaacttcccaatgtgctcacttttacagataacatatgtatatatatatttttatatatatatatgtatatgactgctggcataatgattaaaatgatcagttttattactttgtaatcacatcaagtaacaccgatgattgaaataaaatctgttagatgagtgaatgcaatgataatgtatagcagatgaaagtctttgctatgaagcacatgattgttgtaattgttgctgctcttttgggatcctgaaccagattccccaaataagtaggtaacacggcatttgtcttgagcactttttcaagcattgtaatccatgcattgaagtagacattatcagcctacagctgtaaactctaagatgattttaaagtctgaaggtttataggtcttcattaggataagctgggctcaccatataaatccttgaggactttgctagaaaaatagtggaattattgaatagggaaaagagataatggtaatgggatttgcctgatgtcttcatcctagaaaaaaagatttctgcttgggcattaagaatgatgattctggaagactttcaggaatgttgataaggcttgagttactcaggatttgatgccaaagaagccacactgcacatgtgttcctctaaggtgtacttggttctcacctgagaggcaaaggctctacttattttttgattgtttggtcctaagttaccttcaaactccacttaaccgcatctctaatcctgcgtattgcctttccagcatcttgtaaattccaaggggttgggggaacctctaggttccaaggctaagctaagttataaatgaataccctgtgcagtgttgagaatgaaacagaagctttggcgcatggtagcccactatgaatgcggtttcagaggagcagtccaggcgccctcaatgaataggcatatatgggccaagagacaggcctctcagccataccacagtatactggaacaatgagaaatgggagaggacatacttcttacagtgacacactgacctgttttcattctgtcctctctctgcttctccatttccacttattgcctgtattgcatctgtccagtaactgtttctttaacagttttccagactgacattattaatccagaagatggatggtagtttttttgttgttgttgttgtttgtttgttttgttttgtgatggagtctcgctctgtcacccaggctggagtgcagtggccagatctcagcttactggaagctccgcctcccggtttcacgccattctcctgcctcagcctcccgaatagctgggactaccggcgcccgccacctcgcccggctagttttttgtattttttagtagagacggggtttcaccttgttagccaggatggtctcgatctcctgacctcgtgatccgcccgtctcggcctcccaaagtgctgggattacaggcggtagttttttaattaaaagggaaagctgattttatttggtgagacttctgctatcatcttccgtgttatatcccaatatgagtatttttttaaatgttctactaaatccaatagtacattcacctcactcttgagttaaactcttgactttaaaaaaattagccagaaaaaaaaatcataagaaaaaatgcagcattttaaattctataaatgagctatgtcttaaactatttgggagcataactcaattgtattcattttagtttaagatcatgcaaaaagggaaaggtatagatgctattttattgatatgctgctccacagatttcaaattcaacatcataagccaagatttgtgggaccagaggaatgttcaaaagtataatctgataaattatctgttgcagaaattaagtaaaatattgcatacatctcacttcctataccaaatagatagaatgaaagtactagattttgtatcacagatagtttagacaactacagggaattctgaactttcaaacttttatatcctaaactcaagatttgggccttgaaatataaaactgacaaaactgctacagtgtggatttttaaaattacagttttcctgtggtagagttgacactttctgttggtatggctagaagtcagatagatgcttaatgttaaagaccatgtttttatttcttctctttttctcaccctatgatttcattgacctaaagtggcttttagtgctgttcaattcacacagaagccaaaattggttactgcgttaagaagaaaccaagaggttttatttagttcatgaaacattagcaaaacttctgtttgatgcaaaactgcaaggaagttttgtagtcattgaaaggagcaagaatatacagattgcttgcagttccagtgtagagacattcattatcagatttaccacttgaaaagattatcaagatagtatttttattgtgtttaccaggtaaactaagaactttagttctaagcactttacctattttaaatcattaatagtgctgtaacaagcctctgaggtaggtactgttatccctctttaacagataaagagaatgaggcacaaggaagagaagtgacttgctaaaagcacacacagctgaatgtggaccctgattcaaatctacacatcctgactcaagcatcgttgctctgtattactgtgctacagtgcctcttcacatcctcctgatgcagaaatcttcttctagaataatgagaagcagtgtgagctttgaagtaggacttcctgagcatggtgctttccatcatctctgggccaaagttttctcatctttacaaagggattatgatcaacccccatctcatactgtggttaggagaactgaaaaagaccattatactaaaagatgtcagaacagggcctgacagatcatagggcccaataaacatgagctcttgttatcatcataaatatgttaaaagcagccttagtatatggataatagtagcagaatttcctgaatgagacatgttaaacatttattaagtgggcgctttttagagtttatcctataataattcagtaaggttactcttgtcatccccatttcactgaatttgaggaatctcaggctacaagataacatattagttttctagaatcaaataagcaaggattcaaactcaggatgtattgatcccaaaacctcagatatttctgccgtccctgtcttgttctaaaccccaggtttgctcatccaggccctagttattgatcaaaaagcaccaatagaaatcagagtagagaaagtcatattgagcttgtgagattgcattatgggcgtggtaacaaatgtcattcagatgttttggcacagtgcataacaaccatacttaacctctgtactaagacctgtctgagcccataaataaagttacattaataattatggaatgataagggaccactcagaaaatcttggttgatataggaagtggcgtctgtggcttctaattaagagatattgcttcttgaatcagttcctgaccattgctctagggggatattaagccttctctgtccatgggagatgtgaaattcaacagctgacctgactgcttgtcgctgttgatgatcctataaaatttcttctaagataagaactctgtgttctagtccaaatcaagtgaatatttcctgtttgttgacctacagcttcaagggtatgaggtcataagtttaaaaagatttcttttctctccattgttgtgagagtcattatagttctatcaaatgctccaagtgaatcctgcatatttcctttttgccagatatgttagctattcactctattttcctatctcctctatgcttttactttttccctcatctgtttaccaatggtaccctgaattttagaaccagacaggtagtaggacaaggcaggtgaaactacacaggttgtaaatttcagaatgcaggttcaaatttcatcgttgtctcttgctaactgaatgaatataggtaagatgttttacctctcagagtcttacataccccatctgtaaaatgggaataatactgtcttccatggttttcttgagcattaaatgtctctatttatggaacacagtttcatgtagtaactgattctgtaccaatgccctgcctcctatgtaggcaaatgcatgtcccaaaagacccaaaacaagttgtccctcttttcaagatgaagctttgtaatctctccttaaatttatccagttctggtgtttaatttcctttataagccagaagttgtcttacgtctcaccaaatcttataacatgaatataatactgtcttccaaatgtgagcctctaattaccttaggccaatagcagagcctctgatcttatcttttctccttttccgcttaccagacagcacattctgctgagagttgggacccaaaaagatataaatcaactagggggcagaaatggagattcctaagctcctcccagagtttgactcagtaggcctgaggttcaggggcttgatgttaaacaagcaagcccagtggttctgctgcaggtggatcagactcccaagaccacattttcctagcactggcctttaggaagagcacgtgcctactctatcagagtttgtgcagactatgattgcagcctagtttatgcagactattgattgcagcctcttggcaaggctctataaggaaaagggagccaacgtgtaagtaaattatcacggccatgaaactcctcatctgagagggtttcctctcatcccttcatccctttgtgtctgccccagaatgccagactatcttctccagatagacccaagtcaatctcttatttttaagccattcctcattctcctatatagtccaaaatagcaaatacatttttaggaattctcttgctttatgggtgttcatccaaaaatatttcattataagaataagtgcttagcttatcctgtagtgtctttctgctctgatatttgggcccttcctttccacatagttgcattttctttgatgggcagatgctgcttctttaatatttttcacaactctgtgcttctaacagagcaattatttcaggaagagggcacttggagagttgtaagaggctaaggagcccatgtctctgccttggatttgtgtacctaaatgttacctaattagataaacctgaaaaagatttggaagcaaagtagaatgaaatggaaagtgtttggataataagaatttggacattgttgctctgtggtgatgttggcagactctaagcttcttgcctcattttattcattcatgtatgaaggagttatactcagtcataagtcactaaaatttgtattctacatcccattagtaaagtatttttgaacacacatgatacatatgtttacatatttgtaagttatatatatgtacaacgttctaatatattctgttcattgtcaaacttaaatatatataaatttggtttaatataaaatataaaattagcattagtgtctgtgtgtctgtctcatttctgaaaaaagcgcaatatgtactaagttaaaggttcattcttaatagcagtaggagtagatctttatttcaaatagtctttggggtaatttcctgttttggaagacagcttatcagatttggttagagttgatgaaagcttattctagggttaagaaaagtattagctcagccattttcttattgttgatttgggcttgcataattaggtttaccttcagtatgaagtttctttacatgaatctgtttaacccacttatttgttatataattattagttaaatgaatgttaaatcagtataatctatttatccacaaaatcggtcatacagaacctgcaaaaaaaaaaaaaatgctctaacatgttacatgaagagataactaaagatactacaaacaacccctctgaacagtaacactcccactcttcctgcaaaattcctctcatagcaaatgcaacatgtgactcagacacaggctgactgaaggctttatgtgactcttacatgcccaatattagaaaaccttaatttctttcctattttttataaacaacatatataaacaaacattttagtatattctcattacccaatggatggtcttgcatggtccattttgaagacagtaaactatagcctctatttttatttaatttcaaatacctgtttgccaatattcacagccagcttttgttaatgttcttttctgtcctgtgaatcctgatgtcatatcttgcaacatccactctaaagcctatctttgcactcccgtccatcccccattctctattattgtgctgcctctgatggccagagaaaaaaatcttgaaaatacatattgtattgccctacgggtagaggaaacagcagttatacaattcaaagttgcagcaattcaccacactgtttagcaccctactaggtgtaaggaggaagcttgattttaaaaatatatgcaataatgccttcttcaagaatgtttgggagcatgcaagagcttaatgctcatggacatttactttattccagcaaatttagacccaatctgtgtgtagtttcattttgttttccatttcctgattaactgactatatatctagctacttatttgctgccatctagtgtaataaaatatgttgattatacatggaattttgagcccattatgtagttgaatatcagtactcaaaatgattctttttttctggtttcttataagtttacaaaatgcctagtcagggacctttcttatcactgtaaccctgaacgtggtcttaatattgtgtcatagtatctagggctcaggatcatgagccttccttcattttctataaacgtgacaattggaaactgggtaggggcttagcagttggtggatgtgaagtaaatatataagagtaatcattaagagatcatctcagtttagtgaccatgatttttacttcatggaggcagcaaaacacagcatggattcttaccaatagtgtgaccatgggcaatttatttctcttttggaggcatcattttcttcatatctaaaatgaagtggtaggtccaggtgactgttgaggtctcttccagctctaagagtctgtgtctacatataaatgattttctctgccaaagtaatgtttttagagtcctttataatgccagaaatgaatacggcttctctagtttttctatgtagctatctatcctttggtgtggttagaagtaaacagcgatcctgactggaaagagagggaggaaaatgtggactatgattttattccttttattcttgagagttgtccaatgggatattgtcccctagtggataagtagatacttgccaatatgcacctgacctcttcactcataatgggaatttagaagtataatacctgttataatcaacttcctaatctctatccctttttttatcactctgtttcctattgtaacttctctatgtggtactataagtctacagtaacatataggtgtttccctttccttatgaagttttatacagctactccattatatcctaaaatgttcctttttcttgcttttatagtggggtctttattgttggccaggctggcctcaaactccagagttcaagtgatcctcccacctaatagtagctgggttttcttctgagtagctggtcctaaaatgttttattttcagattatttcaggtgtataagtcttattttcccaaccaggctgaaaacttttcagaatcaagaactgtctttagtttctcattttttatgagggaatgtggcattattgcttagggaattcatgtattttgataataaagatgcttttctgtttgttcatataaattagggtaaaagaggaagtataaacctatctcaaatcaagtacaggactctataattattactggctatctaacagctcatagaagccaataagtctctgaacctaatgccaaagaaagcaaccttaccataaagagaaaatccaaataaaactaaaagaggcaatgggcagtgctacctatgggaagaaaactggcttcacatcccagctttgctacttattatctttgtgttttggctaaaaattgtctaactttcctgaagttaagtttccttctctataaaatgagggttataatactatatacagcacactacacaaaagagttgtgaagatggaatgagaaagcaaatggcaaaaacttagcacaaagtaggagctcaatcaatcatggttaaaaagaacttttatccattgttatttttgcttatatacagtaaaaattatccaagacaaatgtagtcagagcatctgcaattgagctttataaagtgaaagataattctcataccatagtggttctcatcaagggtgatttttgtcccccaggggatatttggcaatgtctagagacattttatttgtcacactggaaaagaggggagtgctactggcatctagtacatagagagtaggaatgatgataagcattctgtaatgcacaggacagcattccacaacaacaaatgatctgatccaaaataccaatagtgtggaagttgagaaaccctaccgtaaagcctagggagtccattacttctgacctaaatttgttttatgtttaagagtgcatgtggatcaaaagtagcttccattttggtaggttatgaagggagttgtctaatctggtgctttagattctaatttggggcatatttttaggctaaggcattgcaatatataaggctttctaagtttcagacattttcttggaggtcagcaaacgaaggcttgggtatctattaacccactagagtagtgtaataatggtggtggttctttattgaagactctataataatctgatttatttttcggcaactgtataagacaggtattttgctctcattttacacaagggaaagctggagcttagagaatttatgtaacattactagcaagttgcacagctgggattcaaactgaaatcctgctagcttcaaagactgtgctgtttctactgatgcatactacccctacctaccaaggctctgagattggaaagcaggatgggtgtgttttaaaggaaataaggtaggaaagttttcaaatattagaaattctgctcaagaagattaggtcaagtttcctgctgaggggcccttgagtatccatgaactcgatgaaaactatgagcttctcaggaaggtagaccaaagggaaaggattactccatcctcacgctgtcataaggacatacacaagactgggtaatttgtaaagaaaaagaggtttaatggactcacagttccacatggctggtgaggcctcacaatcatggtagaaggtgaaggaggagcaaaggcatgtcttacatggtggcagcgaagaaagcatgtgcaagggaactgccctttataaaaccatcagatctcatgagacttattcactatcatgagaacagcacaagaaaaacctgcccccatgattcaattacctcccaccagctccctcccacaacacatggggattatgggaggtacaattcaagatgtgactttgtatggggacacagccaaaccatatcaccatgatatacaatttgccaattcagcaacagattttaagtcttatatttttaagcatgatgcaatatattttatgaattcttcctatttatatgttttccttttaaataggttctactatcttaactatcactttcaaatataatgcaagctacatatgccattttaaattttttagtagttacatttaaaaagtaagagggtgaaattaattttaacaatataggttatttatcccaatatatccaaactattatcattttgacatgtagtgaagctcataaaagcattttattattatgagatatttcttacattattttttcctaatacatcttcagaatctgggtacgcattttaactttccagcacatctcaattgggatgcaaaattttcagcaattaaagcataatgtagccctatcaaaactattaacgttgtgtttaggaaaaaaaaatatttttcactgcttttatttttaaatttgagcttaaattaattaaaattgaataaatttaaaattcagttctcagtcacactagccacatttcaagtgctcaatagctacaaaagactcatggctgccatattggacagcacagatctaagctcttattgctcagaatgtggtccccagagcagcatcaacagcatctgtgaactgatcaaaaccaccaatatttcagttcacacctactgaatctgcattttgtttaaatgttttttatatatatactttaagttctagggtacatgtgcacaacgtgcaggttgttacatatatatgcatgtgccatgttggtgtgctgcacccattaattcatcatttacattaagtatatctcctaatgctatccctcctccctaccccctccccacaataggacctggtgtgtgatgctcagaatctgcatttttacaagatccccaggtgatgcttgttcacatgaaagttttgtctctctaaatcgcagatctttccatcagagcccagaaaaagcacaagaatcaataactgtgaggaataaggaaacttgccacaggagaatggtgctagggttggtattaatgatgtgctctggtaaaaagtcataagtttcccagaaaggcaacaatggctattctattgtttgaactgacacaggtctattctagagcttggacttggctctgctcccagaatctacatcaaagaatctaacactaacttccatgactaccacaattaaggcagctgcataccccaccactatatatatttgaaattgcaactttagaactctgtaacacagccgtgagcatgtttctgctacacacaagtggatnnnnnnnnnnnnnnnnnnnnnnnnnnnnnnnnnnnnnnnnnnnnnnnnnnnnnnnnnnnnnnnnnnnnnnnnnnnnnnnnnnnnnnnnnnnnnnnnnnnnnnnnnnnnnnnnnnnnnnnnnnnnnnnnnnnnnnnnnnnnnnnnnnnnnnnnnnnnnnnnncctcactaatccttatttggtttgtttttcacagaactcagtatttgatgggcctttcaatattttcctttaaggaattcattgtactaatatgacatagaagctcattgttctaataaatggtccccaatgttggctgcacattagaatcacccggggcattttgaaaaataccaatgcccaggcatcacctcaatctaattaaattaaacctgtggaaggtattttgttaaagatccccaagtgattataatgtgcagccagagttgaaatccaccggtccaattagaaggaggccttagctagcagtcaggtgcccaagtaaatgcatctcaagctttaatgcgcatacagatagcctgggatttgttaaaatgcagattctgatccagtaggtatgggtggaaataaacccacatttgtgtacagatgtttctcttgtggtatgtggttggtgatcattctcagtatgcttccatttccggcaaactgggttgagttgatgaccctattcttactcctccatgaaacctttatctcgcccacagactcccagttctcattaatcactactttctgtgatattctgaaacagttattgtctttaattgtgttttttcattagctacttctctatctgcttatgtacataagttatttcctctactggattacaactcttcaaggtagatccacatatcatgtcatttttataattctcactatacctaaagagtgccttacacaaatgccacttgttgattaattgaaacagggaatagctgatgtgatatctcaaaaaatatccaaaggacttaaaaatgcaagatgtttttctttgttggaccaaaaaggaaagtttagacaggcaagggggtaggagatattgaggctttcaatttttatgttagcttatttcactctgggtacatatttaaattttgaaaaattattttgtaatttaatgattttaattatttgtttgaaatagggcactattgacattttggactagatcattctttattgtggctgtcatcctgtgcattgtaatatgtttcacaacatccctggcctcaacccactagatgccagtatctccctttccccctgtcttgagaaccaaaaaatgtctctagtcattgccagatgtctcctgggaaactcattcatggttgagaacccttagtttagaaaaatggaagtgtgacacagctgtcttactgcactaatatatgcctgaaaaaaataaaaattaaaaacatacacgtaagagagtgacaagttatgttctgagcaatatgtgtatatataaatattaatataaaaatgttctctgttcttgcattttggaggccatgtgcttgtagatcatatttatctttgtatttatcatcttgatcattctctttataaaaatagaggtatattgcatgcctctcagcttatgaggttacatcccaatcagcctgttgtaaatttaaaaaatcataagttagaaatatcaaacttgaaaatgcatttgataccctgataaatgcatcataaagttgaaaaatcctaagtcaaaccatcatgagccaggaattatttgtatatgaaacatttttaaaatctgaacatagacttgggaattttaatatgtagtggtagtaattccaccaagcaagagaatgtacatggagcaaaaattattaagaaacagtgactgagattattctcattctcaggaaactggcccagccccttttcataaaatattctgttcagtgtgctgtgatccttggactgaatatactgtttcagtaagcatattgttcagtaagcatattgttcagtaagcatatttagcttaagcagttgttaagctaaagcctgcacaccaacaggtgttcaatgactgtttgttgaataaatgaagaatgaatgaatattaactgcatctctaaaccctaaaattaaaaagctttagtgtgctcttcacaaaagaccctattttgttgcgtttgaaacttcaagcttcagaaatgaaattacatgcaagagtatattatcatcaatgagaataaatggcctcaacaaaattacaagatagaaaacaaagtttcattggtcagttggtttcttctgacaatagaaggctccccttagacttcattagcttcagatatttcaatgacagaaacataatgttggcaaagcattgctatactttcaggcttggattggaatgccccacatttactttttcctaccattcctggctaaaaacttgacatatgagaaccagacacaaggctctagtggtagcaagcagaatgtcttctaagctccaaaggaaaaaaatgatataagtcagtggttcccaaattaaccatcaaatgctaaccattaaaatcactggggaacttttaaaaatcaaatggccaactaacaacaaactgtctgaaaaagaaatttagaaaaccatcccatttttaaaagcatcaaaaaaataaaatacttaggagtaaatttaaccaaggaagggaaatatctgtttactgaaaactatgaaatgttggtgaaagaaattgaagatgataaaaataaatgaaaagataaatgtttgtggattagaagaattaatattgttaagagatctatgctatccaaagcaatctatagattaaatgcaatcctatcaaaattccaatgtcattctttatagaagtagaataaaatcataaaattcacgtggaaccacaaaagaccctgaatagctaaagaaatcttgaccaaaaagaacaatgctggaagtattgcattatcagatttcaaaatatattacaaagctacagtattcaaaatagcatgctacttgcataaaaacagacctaacaactactgaaacagaatagtgagcccagaaataaacccacacatctatgatcaattgattttcaacaaaggtaccaagaacacacaaaggggaaagacagtgtcttcaataaatggtgctgagaaaactggatatccacatgctgaagaatgaaattagacccttatctcatcctttatacaagaaccaactcaaaatggattaaagacttaaacataagccctgaaactataaaattactgaagaaaatacaggggaaaagctccatgatattagactgggcagaagtttcatggatatgacctcaaaagcacaggcaaccaaagaaaaaaatagacaaatgacattgcatcagactaaaaaacttctgggcagcagatgaaacaactaatagagtgaagagacaacctacagattaggagaaaatatttgcaaatcacatattaggtaaggagttaatattccaaaaggtacaaggaaatcaaactactcaataacaagaaagccaataaccctattaaaatataagcaacaaacttaaatagacatttctcaaaagaagtaagtatcaccctgatttaaaacctggcaaagacacaatgaaaaaacaaactacaggccaacatctctgatgaacatagacacaaaaatccttgacaaaatactaacaaactgaatacagcagcacatcaaaaagttaatttgccatgatagactagtgtgttaggttgttctagcatgctattaaaaaaaaaatacccaagactgggcaatttgtaaaaaaaaaaaaaaaaaaaaaggtttaatttgttcatggttctgcaggctgtacaagcatggtgccagcacctggctagcttctggagaggcctcatggaatttttattcatggtagaaggtgaagcaggaacaggaacatcacacaggggaagcaggagtaagagagagtgtgagggaggtgccacacacttaaacaatcagatcttacaagtacgcactcactattgcaaggacagcaccaagccataagggatccacccccatgattcaaacacctcccaccaaggcccacctccaacattgggcattatatgtcaacatgagatttgaacaggtacaagtatccaaactatatcaagtaggcttcattcctgggatgcaaggttgcttcaacatacacaaatcaataaatctgattcaccacataaacagaattaaaaacaaaaaccacatgatttcaataggtgtgggaaaagcttttgataaaatccaacatcccttcacatttaaaaaaaaaaaaaaaaaaaacccttaagaaactaggcattgaaggaatatacctcaaaatagtaagagccatctgggacaaacccacaacaacataataataaatgggcaaaaactggaagcattccccttgaggacaagaaaaggatgccctttctcacctatcatattcatgacagtacttgaagtgctagccagagcaatcaggtaaaagaaagaaataaaagacatcaaaataagaaaagaagaaatcaaactacctctcttcactgactatataattctatacctagaaaaacctaaagcctgcaccaaaaagctcttggaactgataaacaacttcagtaaagtttctggatacaaaatcagtgtgcaaaaatcagtcgcatttctatacaccagtaatgttcacattgagagccaaaccaagaatgcaatcccatttacaatagccacaaaagaaataaaatacaactagggatgcatctaaccaagaagatgaaagatctcataattctgcacatgatcttcaacaaagatgacaaaattagcaatggggaaaggactctctagtcagtaaatggtactgtgataaatgtaaatgtcagtaaatggctagtcagtaagtgatactgactagccatatgtagaagaatgaaactggacccctacctttcaccatatacaaaaattaactcaggatggattaattattcaaatgtaatatctcaaactataagaatgtaatattcaaatatatctcaaactatatacaaactataagatattctatctcaaactatatacaaactgtaagaatgtaatattcaaatgtaatatctcaaactataagaatgtaatattcaaatgtaatatctcaaactataagaatcctataagaaaacctaggaaacaccattttggacatcagccttggaaaagaatttatgattgagtcctcaaaagcaattccaacaaaaacaaaaactgacaagtttttctgttaagaagccttagtttaagaaaaagaaactaacaacagagtaaacagcctacagaatggtgaaaatattcacaaactgtgcctccaaccaagatctaatatctggcatctattaggaactttaacaattgagcaaacaaaaaacaaccccatttaaaaataggcaaacagcatgaacagacagttctcagaagaagacatataagcagctaacaaacatgaaaaagtgtttcacatcactaatcatcagagaaatgcaaatcaaaaccacaataatatgctatctcacaccagtcagaatagctattatcaaaaatcaaaagaacaaagctggaggcatcatgctatctgacttcaaactatactacaaggctacagtaaccaaaacagcatggtactgataccaaaacagagatatagaccaatggatcagaacagagccctcagaaataataccacacatctacagccatctgatctttgacaaacatgacaaaaacaagaaatggggaaaccattccctattcaataaatggtgctgggaaaattggctagccataagtagaaagctgaaactggatcctttccttactccttatatgaaaattaattcaagatgggttagagacttaaatgttagacctaaaaccataaacaccctagaagaaaactattacctgaatggtaataccattcaggacataggcatgggcaaggacttcatgtctaaaacaccaaaagcaacagcaacaaaagccaaaattgacaaatgggatctgattaaactaaagagcttctgcacagcaaaagaaactaccatcagagtgaacaggcaacctacagaaagggagaaaatttttgtaatctactcatctgacaaagggctaatatccagaatctacaaagaacttcaacaaatttacaagaaaaaatcaagcaaccccaccaaaaagtgggcgaaggatatgaacagatacttctcaaaagaaaacatttatacagccaacagacacatgaaaaaatgctcatcatcactggccatcagagaaatgcaaatcaaaaccacaatgagatatcatctcacatcagttagaatggcgatcattaaaaagacaggaaacaacaggtgctggagaggatatggggaaataggaacgctttcacgctattggtgggactgtaaactacttcaaccattgtggaagacagtgtggcgatttctcaaggatctagaactagaaataccatttgacccagccatcccattactggttatatacccaaaggattataagtcatgctgctataaagacacatgcacatgtatgtttattgcagcactgttcacaatagcaaagacttggaatcaacccaaatgtccatcaatgacagactggattaagaaaatgtggcacatatacaccatggaatactatgcagccataaaaaaggatgagttcatgtcctttgtagggacatggatgcagctggaaaccatccttctcagcaaactattgcaagaacagaaaaccaaacactgcatattctcactcataggtgggaactgaacaatgagatcacttggactcgggaaggggaacatcacacactggggcctcttgtggggagcggggagaggggagggatagcattaggagatatacctaatgtaaatgacgagttaatgggtgcagcacaccaacatgacacatgtatacaaatgtaacaaacctgcacgttgtgcacatgtaccctagaacttaaagtataataataataataataataataataaataataataaaaaagtcaaaaacaacagatgctggcaaggctgcagaataaaaattgaactctcatacagggttgctgggaatgtaaattagttcagccactgtgaaaagcagtttggagatttctcaaagaacttgaaacagagttaccattcaacccagcaatcccactgggtatatatccaaaagaaagtacattgtttcttttgaatattgttctacccaaaagacacatacactcacatgttcattacaacacttttcacaatagcaaagacatggaatcaacctaggtgcccaaaggtgggttggataaaaaaaatatggtacatgtccaccatgggatactacacagcaataaaatgaatgaaatcatgtcctttgcagcaacatggatgcagctggaggccattacaccaagtgaggtaatataggaagagaaaaccaaatactgcatgttcttacttacaagtgggagctaaacattgggtaaacatggatataaaggtggcaacaatagaaactggggagtaacagagtagcgaggtagggagcagaaggaggactaaaaaactgttagatactatgctcattccctgggtgatgggatcagtcataccccaaacctcagcatcatgtaatataccccggtaacaaacctgcacatgtattccctgaatctaaaataaaagttgaaattacaatttttaaaaggatggaaactagtcatcaatgtgtttttaattttccaggtgactctaacattcaataattattttaaatattatttcggtctgtataccttctgccagctactaagtttcaggaattttgatggtctcattaaagagaatctgacaaccccatttacaagtgcttcagctaagtttcatttagaatagtttcatattgccaaggatccagtagtgtcttttttacagtgagttacaaattcctgtttttgtgacagtgacaggccaaaattaatgaactgtgatttttaaattgaaaaagtgactgtccaatggagactaaaaagaaaactaaaattatatttggtcaattttagtgttaagcatgattttttgctttgtatgttttagatagactttttcattgagataaaacccaaatagcataaaatccacctttttaatctcaaagtggtttctggtatattcacaatattgtgcagcaatcactactatctaactctagaacattttcattacctcatcatggaaccctgtacctgttagtagtcactcccagtttcccattcacctcatttcctggcaaacactaactacttttctgttgctctgtatttgactattcttaacattttatgtaaatcaaatactataatatgtggccttttatgtctgatttctgtcacatagcaacatgttttcaaggttcattcgtgttgtagcatgtatcagtattttattcctttttaagacaatactttattataggattataccacatcttgtttatccactcatcagttgatggacctttgggttgtttctacttttctgttactttaaataatgctgttatgagcattcttgtacatgtttttgtgtgatcatgcgtgtttgcttctctgggcatatacctaggagcagaattgcagggtcatatggtaactctgtatttaactttttgagaaacccccaaattgctttccccagtagctataccattttacattctgaacagaagtgtgtgagggtttctattacttcatatcctcttgctttctattttaattatttaattatttaatttaattatctaagatgccctttaccctaaccaaccagaaaataaacttgactgaatttagtgctaattgtttttgcatagttattcagtataattgtccttgacatctcaaaacactgcttatgcagaatacacttttttaaaatagtgaaatcatagcaattctatttcgtaagtcagttcttcttcagggtagtaagttataggtctttgaggtcatgttcctgtttccatcttccaaaaggctacattattagaatcttgttgctgtatctaccttggcatatccccctctctatccagagaaaagatcactgagggaatactgtccccacgtttctatcttagaggcctcattaggagtcactatgcttttaagagatggataaagagctagaaatcaagaggaagagagaaaattttaaataagacagaggagtatatgatcactctttctaagaagattaaatgaaataatttgaaaggcaataaactaactgcaccaagtaaatcttgtgaaagcgaaaggaaagaggagaaggaagatgattgattgagtgttgtctacggccataccaccctgaatgcacctgatctcatctgatctcggaagcaggatcgggcctggttagtacttggatgggagatgattgattgagtgctgaaaactaggataaattgtattcagccaccagcattaagggaagtacatacaatacattttatgaagaaagtgttccatgaaaataaaataacaaaaagtaagtttggtgaagatttaaatgataaatgccaatagtagtatatgtgcaatcatctcctgacactgctatacaaatgagctatctatataggctgtgaccacttaacttcacctgccaaaccacagtgctataaataaatacttttccaagacactacagagttcagttgacttgaaattcatcttacagtaactggaaatgtagactgtgcctttatttgggtcaatcctacagtttttttaatgtaccaggaattcattatttaaagtttactagggtttaatttaaaattataaaaaaggaagaagttggctaggcatggtgactcacgcctgtaatcccagcactttgggaagccaaggcgggcaaatcacgaggtcaggagatcaagacaatcctggccaaaatggtgaaacccagtctctactaaaatacaaaaatttgctgggcgtggtggcacgctccggtagtcccagctactcaagaggctgaggcaggagaatgacttgaacccgggaggcggaggtggcagtgagctgagatcgcaccactgcactccagcctggtgacagagtgagattccatcttaaaaaaaaaaaaaggtggggaggctgaggcaggaaaatggcgtaaacccgggaggcggagcttgcagtgagccgagatccggccactgcactccagcctggatgacagagcgagactccgtctcaaaaaaaaaaaaaaaagaaagaaattaatagttcaggtgagaactggtgaatttttattctcaactctaagctagtaagtgcttaaatagaagacttcacaacaagctgtaccttcctcaattctacagagaatcatgaggaaaatcaggtataaatgtgaatttcttatgttcagtactgtccaaaagaaaatattttattaaattttttgttggttgccatcattatttaaagccttcctgccagtagcctatactatttttggaatggagtgtttgtagtttcataaccacttggtaacaccataggttaaaaaaaaaaaaaaaaaaaaaaaaaaaaaaggctaccagtctttttcaaatggcctctttaacactgctttatagggaagttcagttacttttgacaataatgacaagccaaaaaaatttacacatctattttaccatattttgatacactagcagcatccactcaggacagtacctttattaaaaggggggttaaggtatttttaaatggaggaattcctgaattcctgaagctcttcaaacaaagtagcacttgggatacgacaagagtactttggagaaggctgcttggtcccaaaacagagattcaagaagagaactccagctagctgggtaaggtattccctcctctaagtgtttatgtaggcctgctgggggccaggaactgtgtaaaactcagtaaactcagtacttctcagcacagaatccagtcccaaggaagcacccagcaaaaatttagattgaatttcctttaaaataaaatgaagaaaaaagttaaatttaaaaaaaaaaaaaatacaattcaactactcagcccattctcttcagggtagctttggctcagaatggtggaagagttggacaggctattagggaactcaaaactccccaaacttcagttcagcactcttcctttataatatattttttctgaaaagagtattgccaatatatcaataaagctttttgctatgacttcagagtgtccaggtcactagggaaaagtatcaagtagcatcctgaatccacaaatcctttgagagccagccacacagtatctgcgtgagtctggtaattctctccccttatgagtgtcgtcacagaattgcagcactctccttttattgtttctcaggaaaacatagacaaagcctctgcttggatttttttttttaattttaacactaatatgtaataatacagcaacatctcctagttacctagaactcaggcttcgacagctgtgactgtctagaatacaaccacagaaaatcacctctgaacagtaagggaaatagctgccacagtatcaccacctactccaagcttgttcaacccacaaccaacaggctacaagtagttcagtacagctttgaatgcagcccaagacaaactcgtaaaccttcttaaaacattatgaaatttttttgcaatttgctcatcagctatcgttagtatgttttttgtcttgctcagacaattctcttcttccagtgtggcccaggaaagccaaaagattggacacctatactttggatgtttcatctagtaccaatatacttataattacgtgtttcaactagtactaatgaactttagttacaggatgaaattccaaattagcaatgttcatcatttgctcttcctaggtaacaacagttaacaaatcataggttgacaatcacaactgattttgaggatggaaataataacagtgagcatttatataatgcttactctataccaggcacttttctaagaattttacatagattagctcacttaatctttacaataaccctgtgacataccattattatccccattttacaggtgaggaaactgaagaagttaagtaatttgcccaagattacagattgtatgtaacagaggtaggatttgaactcaggagtctggcaccaaaatcagcactctcagcttctacccagtattatcaaaagtaatttcctggtaacttctatcaattgtcatggcgactctcgagataaagaattattgtttttaataaataatgtcattcccagaaatgaattatgtgtgaatcatactaagctgccgtgagagactgaatatcaccatcagagtggtgaatctacttagtgtaggggtaaaagaccaatctctcccagcagccctacacatagttacaccataattcagtagggtaatccctgatccccatgcagtcataaaaaaggttaaatgatgtttaacagatttcgctaatgattcagagaatcttaaaatacatcttaggaaaactaatttcaggagcaactttcagttagctagaaaatacagttctgttgagcatctcgtaatctatgccagacaaaggagacattcttgcctttctttgagggaattatagaccaacaatcttattaattttcaactttcatcgaggcaagattagcttcatgcacaatgtttctcaaactgaaagtagtgacctatattaataaatcaatttatagtgttgcaagcagcatcatttataatttgaagttagaattaattgcaggcagtaattttgagatattttattttacatgtatgtgtgtgtatctatcatataagtaaatatgtgagaacattttaaaatatttaaaaatgtttacatatttaaagtttaaacatgtaaatatatttatattaataatataattaatataaattaatatgttaatttatatgttattaatttatattaacaatatataaacaatatattcattagtaatatattacgtatattatgtaattgtattatatattactatattaaatatattaaaataatacatttaatatattaataacatactaactatatattattcatatttttaatatatcattttaatatatttaaatttatacttaaaatttacatatataaaaataattttcctgaaagtgactttcaaaaactttgaaagccaccagtgcaatggttaagaatacaaattctgggctggccatggtggctcacacctgtaatcccagcactttgggaggcctagatgggtggatcccgaggtcaagagattgagaccatcctggccaacatggtgaaacaccgtctctgctaaaaatagaaaaattagctgggcatggtggcacacacctgttgtcccagctactcgggaggctgaggcaggagaagcacttgaacccaggaagcgaaggttgtagtgagccgagatcacggcactgcactacagcctagcgacagagtgagactccatctcaaaaaaaaaaaaagaatgcaaattctgaagtgcagctgttgagtaggatcatggctgtgccacttaataaccaagtgactttgggccagttattttacttttctgtgcctcagtgtcatctatttggtagtgagaataatagtacctacctcattctagttttgagaataaacacgttttatattacatataaaatgtgtaggacagagacctcaaagaagacgtagttgctgtcatattgttgttctgttcctgcttaagaaggggacttggaaaagtaatgatgttgaatacagtaacttctttcatcatggaagaattgcatattcacatcttctttgctcatcaaacctttgaagatcatgcatgtctcattctgtaacattgccttaaccaaatataaaggctaaatacaaaggtgtttttaaataactgatacatttaggccagtcacccaaagattttacccaaagcctatgcaggcatagtccaagaagtagactagctctgctgcaatcaccatctcttgtttattatttgtgaaaggaacattacagtttcaccacagttggcctggcaacgtgcttattcagtcctcagaacatatgaaagtgatttcggctgacaataagtatttcctcactttggcttatgttcagtaatagccattctttatccagatcagggtgactgagcatgctgtaaccattcttctcttctaaaactgacccttgtttgattgcatatgcagattgcttagcagaacccacgtccaccataacgggccaaaagtcatttgatccaatgtgcttttctttttttctctctctctcttctttttttaattccatgaaattttattaagataaattaattataaacattacagaacacatttttttgagacagagtctcactgtgtcacccaggctgtggtgcagtgacacgatctcagctcactacaacttccgactcccaggttcaaacgattctcgtgcctcagcctccctgagtagctgggattacaggtatgccccaccagatctggctaatttttgtatttttagtagagacagagttttaccatgttggacaggctggcctcgaactcctgacctcaggtaatcctcccgcctcagcctcccaaagtgcaggaattgcaagtgtgagccactgcacctagacccaaacatgattttttgattgaatgcttaatgtcattgttttgttattattattattattattattattattattattatactttgttatggggtacatgtgcacaacatgcaggtttgttacataggcatacatgtgccatgttggtttgctgcacccataaaagttaattcaagatggattaaagacttaaatgttagacctaaaaccataaaaaccctagaagaaaacctaggcaataccattcaggacataggcatgagcaaagacttcatgactaaacaccaaaagcaatggcaacaaaagcaaaaattgacaaatgggatctaattaaactaaagaccttctgcacagcgaaagaaactaccatcagactgaacaggcaacctacagaatgggagaaaatttttgcaatccatccgtctgacaaagggctaatatccagaatctacaaagaacttcaacaaatttacaagaagaaaaccaaacaaccccatcaaaaagtgggcaaaggatatgaacagacacttctccaaagaagacatttatgcagccaacagacacatgaaaaaatcttcatcatcactggccatcagagaaatgcaaatcaaaaccacaatgggataccttctcacgccagttaaaagggtgatcattaaaaagtcaggaagcaacagatgctggagaggatgtggaaaactaggaacacttttatactgttggtgggagtgtaaattagttcaaccattgtggaagacagtgtggcaatttctcaaggatctagaactggaaataccatttgacccagcaatcccattactgggtatatacccaaaggatgataaatcatgctgctataaagatacatgcacacatatgtttactgcagcactattcacaatagcaaagacttggaaccaacccaaatgttcatcaatgatagactggataaagaaaatgtggcacatacacaccatggaatactacacagtcataaaaaaggatgagttcacatcctttgcaggtacatggttggagctggaaaccatcattctgagcaaactgtcacaaggacagaaaaccaaacaccacatattctcactcaaaggtgggaaatgaacaatgagaacatttggacacagggtggggaacatcacacactggggccttataatttctttcttcatttaggattaaagtcatttttgaagatcatttgcctattctttaaaaattgttttatttagtatgtctttgcacaaggttaattcggtgggttttcttttcttgagatggagtctcactctgtcacccaggctggagtgaagtggtgtgatcatagcttattttaacctcgaactcctgggttcaatcagttctgcctcagcctcctgagtagctaggactataggcacataccactacacccactaattttttaattttttgtagagatgggggtcttgctttgttgcccaggctggtctcaaactcatggcctcaagtgatatgccttggcctcccaaagcactgggttttcttaatcatgttaacaagtattgttttgttttgttttcttcctttccttgttgtttgtctgctgccaccccaacttgaaaagaaactgtcaactgctaatagttagttacactttggttagagggcacggttttctcttcacaccgccataccattaaaaaaaaacagctaagtcccctagcctttgttcaagaataatataaagtgtcagggactgtggacagcacctggtccatagcacatggtgcagtggagcagtggaggtcctccatttcaggacagatagctgctgactgcctttcactctcctacctggagctctctgaagaagactgtccttttccttcaaagactcctctccctccaaatttcccctcactccaactttcccctcactcttcagttgctcctcttcctcctttcttagtcccaaaccccaagccaactttgggaaattgcatgtgattgcatttggttgttatttctgctttgttgtgagttgtgcgtaaaaaaggatctccagcgagagaacagagaataaagcaaattaatacttctgtatataagagctgcttgaaatcctacttttatatactgtctgggaagataattttcctccaagggggaagctactaggtggcgaatgaggaagccaactttatcctgctcagcccatctgaagagcaaaacagtcacagtcgcgttaaagtgatatgtggcagccaacaatgcctccaagctcctctgacactgtcaaatgtaggtttagacttaatatcaagtttcatctagttttaaaaactggaatttagtaaaattattttcaagctttctaaaccacaatttcaggagcagtaccagtttaacaacttttttttccataagttattggggtacaggtggtatttggttacatgagtcatttctttagtggtgatttgtgagattttggtgcacccatcacccgagcagtatacgctgaaccctgtttgtagtcttttatcccttgccccctcccactcttctccctaagtcccccaagtccattgtatcttttttatgcctttgtgtcctcatagcttagctcccaagtatcagtgagagcatacaatgtttgcttttccattcctgagttacttcacttggaataatagtctggtcactgcaaataccattaattcattccattttatgtctgagtagtattccatcatatatatatatagattatatatgtatatatgtgtgtatatatagatatatatgtatatatgtgtatatatagatatatatgtatatatgtatatttatagatatatatgtgtatatatgtatatatatcacagtttctttatccactcgttgattgatgggcatttgaattggttccacaatttggcaattgtgaatggtactgctataaacacgtacgtgcaagtatcttttttgaataatgacttcttttcttctgggtagatcactagtgtgattgctggatcaaatggtagttctacttttagttcttaaggaatctccacactgttttccacagtgactatactagtttacattcccaccagcagtgcagaaacgttccctgatcaccgcatgcatgccaacatctattttttgatttttttcattatggccattcttgcaggagtaagatggtatcacattgtggttttgattttcatttccctgatcattagtgatgttgagcattttttcatgtgtttgttacccatttgtgtatcttcttttgagatttgtctattcatgtccttagcctactttttaatgagattgtttttctcttactgatttgtttgagtttgttgtagattttgaatattagtcctttgtcagatgtatagattgttaagattttctcccactctctgggttgtttgtttactctattgactgttccttttgctacggaaagtgctttagtttaattaggtcccagctatttatcatttttttttatcttttttttttttttttgcattttcttttgggttcttggttatgaaatcctcgcctaagcagacatctggaagggtttttccaatgttatcttctagaatttttataatttcagttcttaggtttaagttcttaattcatcttgagttgatttttgtataaggtgagagatgaggatccagtttcattctcctacatgtgtctagccaattatcccaacaccatttgttgaaaagggtgtccttttgccactttatgtttttgtttgctttgtcgaagatcagttggctatatgtatttgggtttatttctgagtttctctattgtgttccattggtcatctctgtgcctatttttataccagtaccatgctattttggtgactatggctttatactgtagtttgaaatcaggtagtgtgattcctccagatttgttctttttgcttagtcttgctttgactatgtgggctcttttttcattccatatgaattttagaattgtttttttctaattctatgaagaatgatgatagtattttgatggggattgattgaatttttagattgcttttggcagtatggtcattttcacaatattgattctaaccatccatgagcatgggatgtgtttccatttgcttgtatcatctgtggtttctttcagcagcattttatagctttccttgaagaggtctttcgactccttggttagggatattcctaggttttttgttttttgttttttgttttttgtttttgtttttgtttttgtttttgttttttgcagctactgtgaatggagttgagttcttgatttgattctccacttggtcactgttggtgtatggaatacctactgatttgtgtacattaatcttgtatccggaaactttgctgaattcttttatcagttctaggagctttctggaggagtctttagggttttcaaggtaaaggatcacatcgtcagcaaacagtgacagtttcttcctctttaccgatttgaatgccctttatttcattcttttgtctgattgctctggctaggacttccagtactatgttgaaaaggagtggtggaagtgggcatccttgtcttgttccagttctcagaaggaatgctttcaacttctccattcagtattatgttggctgtgagactgtcatagatggcttatattacattaaggtatgttccttgtatgctgattttgctgagagttttaatcataaagggatgctggagtttgttgaatgctctttcagcatctattgagatgatcatgtaatttttgtttttaattctgcttatgtgtggtgtatcacatttattgacttgcatatgttaaagcatccctgcatccctagtatgaaacccactttattgtggtagattatccttttgatatgttgttggatttggttactagtgttttgttaaggattttatcatctgtgttctttaggatatcggtctgtagttttctattttggttatgtccctccctagttttggtattagggtgatgctggctttgtagaatgaattagggagggctcctttctttatcttgtggaatagtgtcaaagggttggtaccaattcttctttgaatgtctagtagaattttgctgtaaatccatctggtcctcgacttttttgttagtaattctttaattactatttgaatcttgctgcttgttattcgtctcttcagggtatctaattcttcttgatttaagctaggaggtttgtattttcccaaaaatttatccacctcttttaggttttctagttcatgtgtgtaaaggtgttcatagtagctttgaataatcttttgtatttcagtagtgtcagttgtaatatcttctgtttcatttcttagtgaggttaaatggattttctctcttcttggttaatcttgctaatggtctatcaattttattcatctattcaaagaaccagctttttgtttcatttatctcttgtatttgtttgtttctttgtttcaatttcctttagttctgctctgatcttggttatttctcttcttctgctgggtttggatttggtttcttcttgtgtctctagttcttggaggtatgaccttagaatgtcagtttttgctcattcagtcttctgtaggggtttacggctctgaactttcctcttagcgctgcctttgctgtatcccagaggttttggtaggttgtgttgttattgtcattcagtctgaagaattttttttgtttttttgagacggagtctcattctgtcaccaggctggagtgcagtggcacgatcttggctcactgcaacctccgcctcctggattcaagcaattttcctgtctcagtctcctgagtagctgggactacaggtgcatgctaccacaccaagctaatttttgtatttttagtagagatggggtttcaccatgttggccaggatgtactcgatctcctgaccttgtgatctgcccacctcggcctcccaaagtgctgggattacaagtgtgagccaccacgcccggcccagtctgaagaatttttaaatttccgtcttgatttcctttattgacccaatgctcattcaggagcaagttatttaatttccatttatttgcatggtttaaagattccttttagagttgatttccagttttattccacggtggtctgagagagtgctcgatataatttcaattttcttaaatttgttgagtcttgttttatgacctatcacatggtctatcttagggaaagctccatgcgctgttgaatagaatgtgtattctgtggttgttggatgaaatggcctgtatatatctgttaagtccatttgttccaaagtatagtttaaatccattgatcctttgttggctttctgtcttgatgacctgtccagtgcagacagtggagtactgaagtcccccactattattgtgttgctgtctgtctcattttttaggtctaattgtgttataaatgtgggagctccattgttaggtgatatgtttacaattgtgatattttcctgttggacaaggccttttaccattatataatgtccctctttgtctcttttaaatgctggtgctttaaagtttgttttgtctgatataagaataactatccctgctcacttttggtgtctatttgcatgaaacgcctttttccacccctttaagtttatgtgaggccttatgtgttaggtgagtctcctaaggcagcagatggttggtgagttcttatccattctgctgttctgtatcttttaaatggagcatttaggtcatttgcagtcaatgttgaaatgtgaggtaccattgcattcatcatgctctgtgctgcctgtatactttggtttttttgtttttggtttttaacttgtatttttgttttataagtcctgtgtgatttgtgctttaaaaaagttatcttttgatgtttccaggatatgtttcaatatttagagctccttttagcaatttttgtagtggtggcttggtaacggcgaattctctcagcatttgtttgtctgaaaatgactgtatctttccttcctatataatgcttagttttgctagatacaaattcttggctgataattgttttgtttgaggaggctaaagatagggccccaatcccttctagcttgtaattcttctgctgggaaatctgctgttaatctgataggttttcccttataggttacctcgtgcttctgtctcacagctcttaagattcttatcttcgtcttaacttttgataacctgatgacaatgtgcccaggcaatgattgtgatgaatttcccaggtattctttgtgcttcttatatttggatgtctaggtctgtagcaaggccagggaagttttccttaattattcccccaaatatgttttccaagcttttagaattctcttcttcctcaggatcaccaatttatcttaggtttggtcgtttaatataatccgagacttcttggaggctttgttcaatttttcttattctttgttctttgtctttgttgaattgtattaattcgaagacgttgtcttcaagctctgaatttctttcttctatttgttcaagtctattgctgagactttccagagcatttcgcatttctttaagtgtatccaaagtttcttgaagcttttactgttttttcctttaagctatctatttccttgagtatttctcccttcacttcttatactgttttttggatttccttgcattgggctttggctttctatggtgcctccctgactagcttaataactaacctcctgggttctttttcaggtaaatcagggatttctttctggtttgaatccattgctagtgtactaatgtgatttttgggggatgttaaagaacttgattttgtcatattaccagggctggttttctgatttcttctcatttggataggctctgtcaaagggaaggtctagggctgaaggctgttgttcagattcttttgtcccatagggtgttcccttgatgtagtactctcccccttttcctatggatatggcttcctgtgagccgaactgctgtgattgttgtctctcttctgggtctagccacccagtgagtctccccagctctgggctggtactgggggttgtctcacagagtcctgtgatgtgaaccatctacaggtctctcacctgtggataccagcaccagttccaataggggaggtggtggagggtgaggtgcaatggactccgtgaagtttcttagctttggtggtttaatactctattttgtgctagttggccttctgccaagaggtggcagtttccagagagcatcagctgtaatagtatggagaggaactggtggtggacagggctctagaatgaccaagattatatgccctttgtcttcagctaccagagtaggtagggaaagaccatcaggtggggacagggctaggtgtggttgagttcagactgtccttgggcaggtcttgctgaagctactgtggggaatggggatgggattctcaggtgcctggagctgtgtacctaggaggattatggctgcctctactgggtcatgaaggttgtcaaggaagtgggggaaagccagcagtcacagaccttacccagctcccacgcaaaccaaaggaccagtctcactcccaccgtgacccccatgctagccctgagtctttccaggccatgggcgagatgggcttgaaaacttgccccaggctacctgcctcccaactgtgaaagaaaacgacttggctcttcccccagttgtggaatctgcacaccagatttgcaccctcccccaagttctggccaggaggcttcttgccccttcaaattgttacaaagttcagcaagagaggcttcttcctgtgcaattttaccccctgctcctcttgccaccctccctatggatccctgtggtgccaggccagaatgggctgctcgaggacccagcaaactcccagggcctttctgctgcttcctctacccctgtatttcgctcagctctgtaaattgactcagctctaggtaaggttggaaacttctcccacaaacacaccttcagttcctccagtgggggtatatattcagcagaggagggtctccgtttcacaattccacagttgaggcactcacagtatttggggtgtctcccgggtcctgcaggggcagtctgcttccttcagagggtctttgggtcctctcaggattgcgggtttgttcttgtagtcaatatgaagcttaaattcacatcacgagctctgcagtcttctctgtccggagttgcaatctagtcctgcctcccaaccgccatgatgatccagcctacaacttcttaattaattaattcttattgctggttcatagtctgtcagaagtttaggtagtattatcatttagatgtactactttgcacacatagttaaaatatcttagctcttcaaacattcgtcatgaaacatgattgcactcttctgaagtgacagtattcatcatatcctccccacatcctcctgaactaggctctcgggagttcatagcaagtgttcactcttaatatatatgtctgctagaactgatcagggaatctaacaatatggaaagccaccttctcagtcttacatctaactttatttctctacagtagtggttctcaacatggattatgctttgcaagcacctggggaactttaaaaaaaatctcaatacccaggctgcatctcaggttgattcaaatctctggaagcagaccaaggcattagtactttttaagtctcctcccttcgttccaatgtgcagttccagttgggaattgcttttagcgcatgccaggttactaatttctgagtgttgattaagggaacatccgagctcatcatttctcttgtgggaattttttgagaagcaagagagattggggaacaaaatagctactgttttttgctagtgcaaagagcttagcttaaaatcacacagacctatgttttaatcccatctttgctactacaggaatgtaaagatgggaaactcacttatctcccctgcagtttcacccatttctaaattgaaataacatccaccttctggagtcagtattaaatgagatcatatgtgcaaagtgttcaacatgatgtagtatgtaacatgataggacatagtaataataactaaagatatcactacaaatcaaaatccttattttcaaaattaagtctccaaagaggaaatgaaaatgaatcccaaatctgttgcctagatttttgagtgccaagcagcattaatgctaatatttcttcagcattatcactaagagaaatgagtgttccaacttaactcattgttcttagtgataattcatttagggacaaaattaggctctcctgttaattgccacattcctttcagaggtgctataaatggatgttgaactatactatttttagatttaatctttaaaaatcataagaaagcaataaatattactagttcagaaatgattttctgttcctggcttatcagagaagacctgagagtctatcatagtcatttgttgtcttcatagtgaaacgaaaaagtaagattctaataggatttttagacttagtgagaaaggtgttcattttaagattatggtagttcctctcagatttggaaagccttaagataacactaaggagttggactttaggaatgctgagtgtcttcagccacaatggcactatagtactagatgggacaggatgtgattaaggagaaactaagcagccagccacaatgtagttcttcttgcctccaaaagaggagttactcactttctcacactcactgtgatacattccatttgctaagaaaagtggcttgtgtcattcttgtgcactacttttaagttctgatatattagattcatttactctgtattaatagcattcaaatatttagtaaagttaatatacttctcacactttttccaaattaacccaccagctgtgtcctgtgcttaacgctatcttacaacactgcagtcaaagtgtcagccagggctgtggtctcatctgaaggctggatagggaaaaattggctcccatgttcacttacatggttgttgccaggattcatttcctcaagggttttgattctgagggcctctgcttcttgctaagtgttggccagaggccatgcttagttctttgctgtgtggttctcaccaaacagcaacttacttcatcaaaccagcaggagggtgagtctgctagttaaaaagaagtctcaatcttttgtaacctaatcatagaactgacatgcgctccatgctaccatattcttttgattagaagcaagttactcaagggaaggaaacacataaggctgtgaatgagagaagacaggaattgctggaggccactttaggggctgtctgccacagcacttaacagcacattcccctagccataaaatttaaaaaagcaggaaagagagaaggagggtgcagggtaaaatacagaaaggaggaaggtgaaagggaagaaaggaagggaaagaaagacatttaaaaagacaagaacaaaacagctctgctgcactacatctatgtagtagtgtagtggagagttccatgtgcagacacacacttcatcacattagcaccacacccataaatttcctatttcttatttacaatgagaagattataaggactttctatgcatctggagttaaaaggaagcaataaatctaagaacactaagtttaagtaagcaaaatgtgtttcaaattagttattttttctttttaagttttttgtttgtttgtttcagctgacaaagttttttatttctttctgtttcaagttttcaagttgagtttataattcttgctattatgtaacaggtctattatacaggcaatataggaacctgattggcattcgtatttggtgttctattgttgtttcaactcaaatgccaaaattatgtttttgttctgtacgttattgttcatagttatatatgccccttaattgtaaaagtgaagctgtaaaattgtaaactactttgtaccttatctatccaggcattctactaaggaaatcaagacccaaatggcttgggaagatcaacattaaatagcgtcagagccagaccgagagtatacatctctcaattgctaatctagtgcatttgcttttcttatttctgtgcaaatgaacagttagaatgtgaaatagtctcctcagatctgccagcattaaaacagttgtggtttaagtatttagttttaataattactaactttgtagaagaacctaaaatagtgtttgttttcagtgcttcagctaatagtaaaaaggagtattttcagtactttactgtatgagaggtgcttgcctaacaaaatacacatctttttcactgtactcatttgtaacagataatgtgggctccgacacctcagtgttctgagaggggttggtaaacgctgaccacatagagagagctgcccatctgccctcagtaccaaggcacatcccatccatgccctaaaactcttgtaaatttctccattcgtacaggaaaatgagtatttcttacaacaatatgaccgtggaatttgattacaaaaacattcctgctatccccaacatgtgctcccagggctaaagacataatctgcaactcaggattttctgaagattcacttgtttatactattgagggcaacagttgtttttaaacaaggatgcggttcccagtcctatactttcttcttaccctgcttatttttctttttttattattatactttaagttctgaggtacatgtgcagaacgtgcacatgttacataggtctacatgtgccatggtggtttgctgcacccatcaacccggcatctacattaggtatttctcctaatgttatccctcccctagccccacagcccctcaacaggccccagtgtgtaaagttcccctccctgtgtagatgtgttctcattgttcaactcccacttataagtgagaacatgcagtgtttggttgtctgttcttgtgttcgtttgctgagaatgatggtttgcagcttcatccatgtccctgcaaaggacgtgaacacatccttttttatggctgcatagtattccatagtgtatatgtgccacattttctttatccagtgtatcattgatgggcatctgggttggttccaaatctttgctattgtgaacagtgccacaataaacatacatgtgcacgtgtctttatattagaatgatttataatcctttggatatatacccagtaatgggattgctgggtcaaatggtatttctagttctagatccttgaggaatcgccacactgtcttccacaatggttgaactaatttacactcccacaaacagtgtaaaagcgttcctatttctccacatcctctccagcatctgttgtttcctgactttttaatgatcgccattctaactgatgtgagatggtatctcactgtggttttgatttgcatttctctgatgaccagtgatgatgagcattttttcatgtgtctgttggctgcataaatgtcttctttggagaagtgtctgttcatatcctttgcccactttttgatggggttggtttttttttttttttccttgtaaatttgttgaagttctttgtagattctggatattagccctttgtcagatgaatagattgcaataattttctcccattctgtaggttgcctgttcactctgatgatagtttcttttgctatgcagaatctctttagtttaattagatcctatttgtcaattttggcttttgatgccattgcttttggtgtttgtcatgaagtctttgcccatgcctatgtcctgaatggtattgcctaggttttcttctagggtttttatggttttaggtctaacatttaagtctttaatccatcttgagttaatttttgtatatggtgtaaggaagggatccagtttcagctttctgcatatggctagccagttttcccaacaccatttattaaacagggaatcctttccccattgcttgttttgtcaggtttgtcagatggtttgtcaggtttgtcagatggttgtggatgtgtgatgttatttctgaggcccctgttctgttccattggtctatatatcttatttggtaccagtaccatgttgtctttgttactgtagctttgtagtatagtttgaagtcagagacacaatagaaaaagaaaattttaggccaatatctctgatgaacatcaatgcaaaaatcctcaatacaatactggcaaactgaatccagcagcacatcaaaaagtttatccaccctgatcaagtcagcttcatcgctgggatgcagggctggttcaacatacacaaatcagtaaacgtagtccatcacataaaccgaaccaatgatgaaaccacatgattatctcagtagatgcaggaaaggccttcaacaatattcaacagcctttcatgctaaaaactctcaataaactaggtattgatgaaacatatctcaaaataataagagctattcatgacaaacccacagccaaaatcatactgaatgggcaaaaactggaaacattccctttgaaaaccagcagaagacaaggatgccctctctcaccactccttttcaacatagtattcgaagctttggccagggcaatcagacgagaaataaataaagggtattcaattaggaaaagaggaactcaaattgtccctgtttgcagatggcatgattgtatatttagaaaaccccatcatgtcagcccaaaatctccttaagctgataagcaacttcagcaaagtctcaggatatgatatcaatgtgcaaaaatcacaagcattcctatacgccagtgacagacaaacagagagccaagtcacgagcaaactcccattcacaattgctacaaagagaataaaatgcctaggaatccaacttacaaaggatgtgaaggacctcttcaaggagaactacaaaccactgctcaaggaaataagagaggacacaaacacatggaaaaatatcctcatggataggaagaatcaatatcatgaaaatggccatattgcccaaagtaatttatagactcaacgctatccccatcaaactagcattgactttcttcacagaattggaaaagaactactttagatttcatatggaaccaaaactgagcctgcatagccaagacaatcctaagcaaaaagaacaaagctggaggcatcacgctacctgacccagcttatttttctacataggatccccacatccctgcctttgttagaatggaaactagacaaggaccaacttttatcaacttgttcatttctctattcctagaacagagcctggtacaaaatttgtgtttaataatgtttgttgaatgaatctgaatgatggatttgtttagaaggtttgtaacattccatcccttatgagtttgttgctagtggaaaaaagaggcatgtttttggttcataacatcaggtatgtaacctggaatttggaatcatgagttttcatgcatttgcttcatattatttatttttaagtgatctttcaaagtattgataaagatactttaagattgagagcctccctgatacccaggaatgaaagttttagattaagtttacaatctgattgaaggctaatcatataaggagaaaaaaaataaggaaaagaacagaaatttggaaagaaatctccaaaatggccatgaacatcagaacactgagaatcgatatataaacatgtgttttgcttcatacctgtctgttgtacatctatagcagcagatttcatagatgcagaggaattttggctaaaatcctaacacataaaaggcattctgcacttacttctcaaattagaattaatacatgtgtatgtataagttgtttagaattggcatctatttaatgagtttactggctgaatcttttaaaagaatgcaaacatacgtgacttttatcaaaaatctatgaaaagaaaaatggccctgtagtgcatcctgtggttcccactctacatcccccacgtccacctgatgtcagcacaaccatctgtggcatccattggccactatgccagtcaggtgcacactcaggtgcctgcctcggcaaagaccctcagctcatgtgcaggtagagcctagaagtgcatggaggtgaacatctctgaggcacccttcaaccagtgggtactgggagtgatagataaatgtcctagcctctcatctttctacacaacaatgctggtgcatattctacacagtagctcagtaacacacgcatattagttgttctccctttccttcccaccctccccattccctcactgctacatctggaagccagatgaactgcctatatccaaattctaatctctagctctcgtttcttaaacaggtcctacaaaatgcttgaaataaaaggcaaaatggtttgtatctggaatcaaaggctgacaatggcaagcaacaagctctaaaactgacacaggaaaaatgcttttctggaagacattggcatcacctcctagacacggaatatgctggcttcatcccagtagtttcttcacacacttttaaatacgtgtctcattaggatcacatatgacccacctgatttcatgccttgccttttctttttattctgcagactcttctaaggagcctaaattcaccaagtgtcgttcacctgagcgagagactttttcatgccactggacagatgcggttcatcatggttcaaagagcctaggacccatacagctgttctataccagaaggtgctgccctcatgcctttccaattttcctctccatggatatacctactaaagtacactgaatcacatatagtgtgggaatagaagtgatttgttgtgatttatgtaatctatgaatattcattcactcatttactgaaaaaaatattaattaagcctatcctatgtgctgagtactattttaggccctggagatatagcagtgattacaaaagacaaaatccctggtctcatggagatttccttccaatgcagggagacaggcaataaaaattgaataaaatgtcaactagtaatataggttattaagaaaaataaagccagaaagcagcatatcagcagtgtttgggagtttgtgtgtgtgcatgagaatgtatgagagtgtgtcaaagtatgagtgagagtgtgtatgggtacacgtgggcatgtgcctgtggatgagagtgtgtataagaggcttgagtgatattgaaatgggtgatcctaggaggcctctctattgtggtgtcctacaccagagacataagtgaaatggaacaggtcacgtgaatatctgggggaaaggctatccaggcagaggaaattgcaagtacaaagtccctgaggcagtcttggcctattcaaggaatgaaaaaggccagcactgaaggcacaagattgaaagtgaggagagtgatatgggaagagatcagagagttacttagggactgactatgccaaacctcgtagacaagggcaaggctttaaattttactttatttgtggtggaaagctataggtgtttttgaaaagatgcatgttttaaaagatgtagcttggtttctaaccagataatacactccttctcttaaatatattcagtaaaagactgtagtactttttcatttttaccagtgatcctctaaaataacagaggcagggtgaaacaaacacctctcaatataggtaccacccaagttgtttatttcttccccttcacctggcattatttttgtttttggtttactcttactctgtatatttttaccttttatacattttaggcttaaacacttcattatctcttcttttccacccaacccccagagaatgcctaagccaagatgcaggcttagtgaggaccctttatccttggctcaaggtgttcgttagtcggaggatgatattgtctatcccacggaagagctgggaaagggaaggaagatgcagccaacagttaagggtatgaactcagggccaacaaacctgcacttcagtgtacttctgcactttctctcttttttttttttgagacggagtctcgctctgtcgcccgggctggagtgcagtggccggatctcagctcactgcaagctccgcctcccgggtttacgccattctcctgcctcagcctcctgtgtagctgggactacaggcgcccgccacctcgcccggctagttttttgtgttttttagtagagacggggtttcaccgtgttagccaggatggtcttgatctcctgacctcgtgatccgcccgtctcggcctcccaaagtgctgggattacaggcttgagccacggcgcccggccaaggaatactcgggaaattagccagtttgtgtacaactcagcctcctcatttgcagaaaggagataacggacttgcctcgtggcttcttgtgaggatcgtatgagataacccatgaaaaatacttggcagagtacttgacacataataagtactcagcaaattgtagctgatattcttattatcggtagtatagtgataatttaaaaataattatgatatagcaatccagttcctggactataaagatgactataagtggtataagaccatttataccaataaattgttataattattggtataagaccattttaatgcagagctgctgcttaatttgcagataaaaaaatacttggagttagcaaccaagtggaccttccccacctttcagtgtaagagaggtctcttggatgaagtgaagtgaagatgaaatgtttgggcaccaattatactatatttttccttaaggctgacaccacaaagaggttggggcctgtaaacaaagttgatttctataaacacattcggacatgaagttagtatgtttgatgacacttttgaaatgtgtggaatcgttatgttatttgtgcaggcacaattagccaaactgtaaagaaaattagcagaataacctcttaagctgggcccactttatgaaaataattttttgctacctcagtatttaccaaatttgaatataagcaaaaagagaaatcgaaaggaatgaagccttgataaatatatgtcccttgccctcatcaatcagcgtcacataactgtttccacaggcatcttatgcacaccccagtcatttcagcatccctggttcaaatccagcatctacactaccaaggatgctgctgaaagtgtgactgggtagagggaaaatttcagacatattcagaaagatgtcttagattttaccctgatagtgtttggaatcccaggagagtaagtacaacttcatgattaagtgccaacccaaacttacaaaattagatatttgtgttttttctataaaatataactattttgaatatcttagccaaactactatgagcccacagcccagtttatcgaagaagggtaaaactgagggattaggagtatcaggattggactggactgattagtgtacagatatatttgacttctcattgcccacttcacaaagaagacaatacaaatgcactttctgactcttgtcattgtttcttagaactcagttgccaggcaactcctgaaactatagaaacatgcttcgcatccctgacacataaataaaactgtggattttatccaaaaccagagtcagtgggaggtgcagttgtttcagtttgctggcctggcctgtctaaagcacaatggaatgtgaacatgtcaggctgtcaacacgacatttcaggcacagccctacaggcagttgtgtgttttgcgtggctctgctccttgccaggtagctggcagaagaggcagcctccacatgttaaagcagctgattcaaaacagtctctgccatcctgtgatggcgatagtgccaaactcagcctctgagcttgcaggggactcgggatgaatgcacattacaggcatggcaaaaggaggctctgagaagcatgttcgagctgctctgctctcagctccttgcatgtaaaagctgtatttttaaaggaactgggcatgtgaacactcagtccttaaagttgtatccctcacctcttccatacccattcaaccccacttcaaaaattaccctagtcttaagagaaattttattttctatacaaggttgtgtggaaaatcagtagggagaaagggcattattactttcatttttcttaaacaaaagtattgaatttaaagccaaaaacatgtgagctttctgtcatgaaaacagctgcccttaaaaacataaatgaggttttatttttattattttttccagttggttgtctttagatgaaaaacatttcttctgctctttattcttatttttaatgatagtctctttctatggttctcaccccttccatttcacaagatagtctggcagcaaacctaaagcacttaacttttgggagtaagagcaaagggtagcttccatgaattgatttgggtcttctgtagagacattcaacccagagaaggcaagtgacacagtatctgttttatgagctaatttgggttcttgtctacatttaatagtttaaaatataagttataaatatttatttaaagcgaaattcaacattggttcatgaagaaagaggttggaagcagtgttttgaactagctgtttctgatccatcatgcttaaaataaatgctttgtttgtcctgtggagttcatggatttgggataatctaaacagggttttttacacagtcctcatggggaccaaggtactgacatgcactgttgagaaattctgtgaatcatgaaagagttaatattttagaaatccagacctgttgagcactatctacatctttgggacgtcttaatactttgagttttctaactttcatactatcacttatgctaagtacatttgatatcccttctattatgtgaaagcttcattttctgggcaatcttcttacaactactctttttaatgcactcttacttagtttgaaagtaaatgtcaaattaagcatactatagttcaatgaaggacccacctattcctaatttttttaagcatttttcttctgactctacatacacacatgcttacacacgcacaaacatacacacacacacccccttatcttttcttctgccttttgcccacttactttttgcatcagagatgaatctcattcaagcacatgccagttgttttttgttgttgttgttgtttttgagatggagtcttgctttgtcgcccaggctggagtgcagtggcacgatcttgactcactgcgacctttgcctcctgggttcaagcaattctcctgcctcagcctacctactgaatagctgggattgcaggagcatgccatcacatccagctaatttttgtatttttagtacagacagggttttaccatgttagccaggctggtctcaaactgctaacctcatgatccacctgcctcagcctcccaaagtgctgggattacaggcatgaaccaccgtacccagccagcatatgcaacttttaagagtctcaaccaaagcagcaattcactatctcagcccctggagtctctgccatttaaatcccaatttccttccaacagctgaggagcagccgtctcaagtaccccctgatactacacaagttttctcctagtgccaagcagaccagcctgagaaacagctataagaaggaaataggcatcttctcccagctttgcatcccttccttccaggtcctgccttccttacagcctgcaatgtcctcattgtccactgctgcccagcacccatcccacagagggatggtcccaaacctccacagtctggcctgtgagccacaggagcctctggctgcacaggccattcctacctcatcttccacaaccacagattacgtggttttatgtccctttgacttataaattatcttctcaattaataggctagtgaataacaggggataatgaactacctcacccaagtagcaattctaatttaagaaaactttcctgtcattccattgccttttgcttcccttaccacactcatgcccatacttccttacctcaatccctctgacctctcagtttcctcccttccttgccatattgccatctattaaacttttacccatccttcaagaatgctaaaaatacacctccaccttgaagccttccatgaagagccacagcaatcattccctcttctgaacttttaaggaccctagagagcactactaatgagcacttacccacattgctttgtaataccattttttactctttccttctgaggcaggaggaattccttagacatctatgaatcccccatagtgtctgtcattatgtttcagacataaccaattctcattaaatatcaatgtaatgaatataagaggcccaaaaaactactcagatgggaatttgagtcttattttagcctgaaattaggggaccacaacttacttatctttatatctacacagtgttggtgctggatgtaatgcatcactctgcccggagcacacatcaacttgtctcctcagtttctttcaccataggctgggaaaacagccaggtctaaactttcactgttctctgggactctctagtttggggtgattctctgtactgttttaatgaacatttttaaaatgtccctaagtctcagaaccttcatctataaaatgggcataataaagtacctaccataggaatcaatttatgaccaggcatagcatatacattcaataaacggaaggttttaccataggcagaaacaccaaatggcctcttagcagtcttcagacactgatgatattgtccaccaatgtgatatgtcttggaaatggtgttgctaaaacacctcttcacaaaatatttgtgttccaatttattgaatcagactatcaagcaccttacttggacttcagctacaacatgatttttggaacaattaatcttttttaatcctccattttaggaatattcaaggacagactcaagaatggaaagaatgccctgattatgtttctgctggggaaaacagctgttactttaattcatcatttacctccgtctggataccttattgtatcaagctaactagcaatggtgatacagtggatggaaagtgtttctctgttgacgaaataggtaaatcacaggtttttgtttcatttgacatagttttacactaaataaatggggaagcctgcaaggtccaagtataatcaagtaggaagacttagtaacagtgttctatagatacgtggagatctgttttacaggagatgggatcagctggtgaacaagaggaaaagggcagggggaacttaagttgactttaacataaagtaacctggcagtaaatgatgtgaagaaaagaataggaaccttgtggagtcttttcctttaggatatctttgaagctgtgttgtgttcttatgttctattgcaaagggtaaacttaatatattcttaggatttcttacttcctaattatttgataggatgcttatattcagattcactgaaatacgttggcctttgacctctaccattgctataatcaaagcctagattttctttatcacaaagcataatcattctggaattttacatttacaaaacagccacagtcactttaaagacatgtttataagatctcagaacaaatactggagacagttagctcagtgaactaagtgaaagatccaaagagaggatcctttgcccatcatatggacacaaggtggaaacaaaacaaataaaacaaacaactataattagaatattcatgtttataccttaatagtataaacagcaaaatagaaagaatcaaagaaggacattgagtagctgaaattggtgcctcaaaatctatccacaaaagctaatttgttgcttataggaattcctcattgcttctcccaaatgtgttgttcttttatgtggttttctaggcataagctgactggaagagataggagtatgtggttagaagttacagatggaaacaaataaaatctaataggctgactttaagggagaagattaagagacctgtatcaagcagtaaagataacccaattgctttgcaaagacaatttagtatgtgtccttaacatcagtggtatagctgttgagctgaaactaaatgggatagcagaatgggatagtagcaagaatactgggttaaaacccatgttctaactctgttctctgccaatagcatatgaccagtcctactcatttacctggctgactttcactgaacacctgtcatgtgccaggcactgttctggtggtggtggtggttatagaataagtacgatacagtcgaagaagggagtcaggcatgttcacagataattgcagtgcagtgtgagaggttttagcctggaaatatgtggaatgcacagctgcaaaggtggccaaatgtgtgaatgattgacaggcctgagggatgaggaagggctgcacagagatggtgacagtttagttacctctgaactggaattggactctccctattttttaaaaagtggctacccacagtggtcaaaagcatgagtgagtgttgccaggtactgcagtggacttgcctttcagtaactactaagttccagcagtaacaaatagcacatgttcagggactcaggagcagttagaaagccctcctagtcagctggagaaatcatcagtagttgttcgtgccccaaaaaggaatttggagtttaactgtcacaaggtacctttgaggatgtttaaatagggaaatgacttgagaatagtaacagctaacagtcacaaaagacttaccacgtgtcaggtataaaaaccatcttttgcaatcgcactttacagataatgaaaccgaggcgcagggcatttaaaggactagttcaagtaaaacagctagtaggtagagctgggatttgaacctccagcctccatgcttttactcttgaggctttgcagtaccacttgtctcattatcaatgcctcagagaaattaatcttattgcaatgtgaaacatagattggagtgggacagactaaaggtagaagaggttagaagactgagatcatcaaggtaaaagattatgacaggcagctacaactagcacaatagttgtgggagaaggtgctgagagtgaaagaaaacaaagaactaaggtaaccctaatagatcttgagaaagttgtcaatcattataagcctcagcttcctcataaaatatgtatgtatggtactacctcacagggctgttctttggatttaaagtactgtattagttagacatttgtcattcattcaattcattcagcaaatatttattatgttcttttctcaggccagtcagtgttctccatactggggatagaaactgtcttccctggtgggatctaatcccagcgagggcggaaagtgacaatgctatggagaaatatagaaaaggagaataggagtgttgaagaggttgcagtgttgagttttcaggattggcatccctgagtcagtggcatttgaataaagaaggattagagaggataataatgtgtgtgtctcagggaagggcatttcagcaaaggggcacagccagaggaaagatctcaaagtagaagcatgcttttcctcactcagtgaacagcaggcaggcggtggggtgggcacagagtgagcgaggagactggtatgagaccaaatgccacagacaagacagtcaaatctacccaaccattgtaatgactttggctttcacttggagtgaggtaggaagcctttggagggttttagatgatgagtgatgtgatctaatgtgttaggataatcactgcgtcatttcacttgacgattgcatggagaatagactggagggggacaaagaccaaaggagtacagtggggagacaaatgcagcaagaagaatgaaaaaggataatggctaggaccaggttatagtggtgcaggcggtgagacatggttggattctgttatatcttgaaagtacagctgatggaatatggattagtgaggcaaaaatgagccaaggacgagttcattgtttttatcctgagcaactagaggaattgagtcctcattaacagagatgggaaagaggaaaggagagcaggttttggagaggaagagcaaaggtttgtttggggatatactaagtttcagatatttttaaaatatctcacaggaattgtcaatacagcatgtagatgtatgtgtagaggtaaaggagaggtcattattatgcctgtaatggtgataccaagccttttccaaaaggaccttgtctcatatcctctatttttcaaatgtagcgtaagtaataagttataaaaaaaatcttccattaaaaccagttttatagtttggtcactttaaagggttgagctttgattatcaggattcctgaatctccaacaaatccagaaagttgaggaattactgccattgtatcggcatatgtagtttggccattttgcatatccttccaatttaattttcaaaatgtagtcatgattcatcaaattttgactctccctgtttttaaaaaggtggtgtcgaccccagagggcaacagcattctcctccaccataaagcctgttttcatgtgggtgcacacaagagcttccctctttggccaccagatttgacagtcagtaagagctcctcactgtgtgtatctgtagagttatctccagtcaaccctagggatgcacactttgcaacactctaggtggccttctgtatatgacagaaaaactagcaataatttaccgggaaccatctagaatataaatttagacatagtttctggctttgaaatccatatttttcttcatcagcctttgagaaattgtggtctttgaggtcctaataagcagaatgcaacaaattttcctgggactgtagagtatatcagtagaacctgaggaaaacagtgtttcaagttgttcatgtgacagttaagaaaaagacagaaaacactgaatcgtcaccatttatgagactagcataatgccttcttccttcttatgtcagaagaaaacatcacatgtggctaggaagaccacaaagctagggagcgttagcagcgtgtgcaggaagatcgtatgagaagattgaagaagagtgaaaaaggataatggctaggaccaggttatagtggtgcaagcggtgagacatggttggattctgttatatcttgaaagtacagctgacagaatacggattagtgaggcaaagatgagcctttcggggaacaacacagaaatgagataaatgaggtatctgcccccaggccatacatagttgcaagaaaaaagatttctctacccctagttccacagcagcctcatgtctcaattccgtaggtttttctgactctgttttttcagtttcaagcgaaaatgaattcatttgccaaaatccagatgcatttatgatatcagagcaaaaagaaatataaaacatggcagatcttgaaaatattttttggcagattttttgctcccaaaggaatttttgtaagggcttatttaaaagttaaaaacaagtcacttttgcgttaaaaaaagttactctcttataaagtgaaagttataataagaaaaatattggaagaaataagagtatgaacgatcaaaaatatagaaagtaatttggtcttctgagaagaatgccttccattaataataaattgtgtctgtctgtgtactaatgctctgttgaattgcacagtgcaaccagatccacccattgccctcaactggactttactgaacgtcagtttaactgggattcatgcagatattcaagtgagatgggaagcaccacccaatgcagatattcagaaaggatggatggttctggagtatgaacttcaatacaaagaagtaaatgaaactaaatggaaaatggtaagatgtcactacaccttacactttgacttttctttctatttcatcaacctctctctcatttatcattagactttcttttgacctaataccacatgttcatgctgtatgcgccataatttcttatttgagaaaacatgatttaatcggtaaaatatcttgaaattctgttaagacaggagatgcttatgtatatatggaggcctgtggaaggaaaggaaaactatttctccattcattcttgaggtccagtttaactttagagtaaaattatagactggccacttatctgtctttggggatgtggataaaaatggaaaagtttgtgatcaaagtcaacagtgactatggccaaatattttcccatgatttcagttgctgctactcaaaagactcccattaaaacaaattcatacgtgtttacaggaaacagaggaagggaatttgtctcttagaggtttcagaaggatgttttgttacatacctcagagaagaatcaagctgagattctcacgtaggcaattagagagcatggtactggttaacctctgaatccctctcttccttaccaagcatatggaactcagcacttcgataaaattcacatggcacataacaagaggaaaaacaggagtatcatgctgctcccaatataactaattctaaatctgtctaaccacagccacaggcacagccaaaccaagcagtttctggccactcatcaggtgatgcccagcagcctggcacagatcactcccagaattttgagacaccaggacattcagtgaaccactgaaaaagatgccaattttgtcattagagggaagttaagtttggagatactttgagtagttgcaatactggactttggggctctattttctgaatcattttaatgtagatatctgttctgtaacttggtacaaataaaagtcctggttagatgctaagtcaaacaagactgtctacatccaagctacaatcaaacattattcagcaacaggtactgaaataactactatgcagaaggcactgtgctaaatacctgaggtggcggttctcaaagtgggaaccacagacccctgagggtccctgagaccctttcagagagttcagtactattttcacaatacactaaaatgttattttattcactatgctgaaatttaatttaatggcacaaaagcaatgctggaaacactgctggcaccttagcatgaagcaaggcggtaggatcaaattttactaatagtcattatattcttcatcatcatgcactgacagtaaagaagggggaaaaagctagtttcatgtatgatgttcttgatgaagctgtaaaaattgttaattttgctaaacctcaacctttgagtacatagcttattaatattctgtgtgacatatgggaattacacattaagcatgtctgctgcatactgaggtattgtatttgtcttgaagaaaagcgcttaaatgactgagctgccagctgaactagttgcttttattgcttggagcaccatttttacttggaagacaactgataaactggcagatggttattcatatttgaattggcaaacatttctcaaaaaagaatgaggtgagcttgttgcttcaagaaaaacaactgactgtattttttgccatggaaaaaatttgacttttcaaagcaattcattttgcctttttggaaaatttgggtctccaaccgtgagcttgatagtgttttaatatttgaagacttttcttgaagagattcatggtgatattaatgaaagtgattttttagttgtattgtgtaataaaatgtatgaaatttagaaaaatctacaagtcagtgaaccaatattttccaaatgactaatatattatgtaattaaatcatgcatggggaaatgatccattaaaagtactagatagaatggtgaatttttttaatgatcaaaaaattttttgtatatttattgtgtacaactttttttgaaatatggatacattgtagaatggttctatcacagtaagtaacatgcattaccacacacaccattttttgtgtgtattgagaacactgaaaatctactcacttagagattttcaaaatacaatacataggcattaactatagtcattattttgtacaatagatttcttaaactcgttcctactaactgaaaattttagttctttcgtcaatatctcctcaactctccaccctacccacaacccctgataaccaccattcaactctctacttctgagttcaacttttttagattctgcatataagtgagattatgtggtatttatttttctgtctctggatcatttttcttaatataatatcctccaggttcatccacgttgtcacaagcgacaggatatccttctttttttaaggctgatagcattccattgtatatatatacaccacattttctttatcaacttatccattaatggaacataggttgattctatttcttggctgttataagtaatgaacatgggagcccagatatttcttcaacatactgatttcattttccttggatatatacttagtagtggaataatataatggatcaggtggtagttctatttttaatcttttgaggaagcttcatatcatttttcatagagggtatactaatttacactcccaccaatagtgtgcaagggttcccttttgtccacattctcaccaacacttgttatctcttctttttttgaaaatagccatcctaacatctttgtgcactctatgccttctgtgagctgatagctcattgtggtttaaatttacacttccctgatgattaaagatgtcaagcatttttcatatacctgttggccatttctatatcttctttttaaaaaactatattcaggtcttttgcctgttttttaattgggttatttattttcttgctattgaattggtttagttccttatatatttcagatattaaacgcttatcagatgtattcaaatattgtctcccattccataaaatgtctcttcactctgttgattgtttccttggcagtgcagaagccttttagtttcatgtaatcccatttatctatttccacttttgttgccttgcccaatggagtcatatccaaaaaatcattgcccaaaccaatgtcatggagcttttactctatattttcttccaacagttgtacagtttcaggttttacatttaagtctttaatcaattttgagtttatttttgtatatgatataaaataagggtatgatttcattcttctgcatgtggatgtccaattttcccaacaacatttaaagacagaatccttcccttactgtatattctgagcacctttgtgataaatcaatttactatgaatgtgtggatttatttctgactactttattcttttacattggtttatgtaatgttaatgccagtaccatgctgttttgattactatagctttgtattatgttttgaggttggtagagtgatgatttcaacctttttctttttgttcaagattgctttggctattcatagtctattgtggttgcagacaaattttagaattgctttttctatttctgtgaaaaatgacataggaattttgataaggattgcattgagtctgtagatcgctttaggtagtaggaacatttgaacaatattagttcttctaatccatgaacatgggctatctgttcatttatttgtgttgtcttcatgttttacagtttacagtgtacagatctttcacctccttgtttaaatttatttctgggtattttattttatttttatttttatagctgttgtgaatgggatttttttatttctttctcagattgttccttattagtgtatagaaatactactgatttttatatgttgactttgtatcctgcagctttactgaatttgtttatctgttctagcaattttttgttgaagtctttagggttttctatatataaaatcatgtcatctgtaagcaaggacaatttaattttttcctttccaattttggatgccttttatttctctctcttgcttaattgctctgaataggattttgaattgagtagagtagagtagaatagaggagttacactgaatagaagtggcaagagtaggcatctttgtcttgttccttgtcttagaagaaaagctttccacatttcactgtttattctgatgtgagtttgttatacatggcctttattgtgttgaaatacattccttctatatctaattgttaagggtttttatcatgaaaggatattgaattttgacaagtgcttcttctgtatctactgagatggttccatggttttgttcttggttctagtaatgtgatgtattatgtttatgtatttgtgtgtgatgaatcatccttgcatccctgggataaatcctacttgatcatggagaatggtccttttaatgtgcttttgagttagtttcctggcattttgtttaagatttttacatctgtatttatcagagatattagcccataattttcttttcttgtagtgtcctttcatggttttggtattagggtaatgctagcatcaagaaatagtttgaaagtatccccttttcttccattttttggaaaagtttaagaaagattggtgttccagtgaagcttccagtgaagctgtcaggtcctgggcttgtctttgatgacagacattttactactgattcaatctctttacttattattggtttatttagattttctatttcttcaagaaaattttagtcggttgttgtgtgtaggaattgattcatttctcatgcatataatttttcagaatggtctcttatgaacatttgtatttctatggtattggttgtaatgtctcctccttcatttctgattttgtttttagtttgagccttctctttttttttttatgatttagtctagctaaggattggttgattttatcttttcagaaaaacttgtttcgttaatcttttctactgttttaatgtgctaactcaaaagcacattaaaaagatcattctccatgatcaagtaggatttatcccagggatgcaaggatggctcattacacacaaatacataaacgtaataatcacattactagaaccaagaacaaaaccatggaaccatctcaatattttctactctctgtttcatttatttctgttctgatctttattatttccttcnnnnnnnnnnnnnnnnnnnnnnnnnnnnnnnnnnnnnnnnnnnnnnnnnnnnnnnnnnnnnnnnnnnnnnnnnnnnnnnnnnnnnnnnnnnnnnnnnnnnnnnnnnnnnnnnnnnnnnnnnnnnnnnnnnnnnnnnnnnnnnnnnnnnnnnnnnnnnnnnnnnnnnnnnnnnnnnnnnnnnnnnnnnnnnnnnnnnnnnnnnnnnnnnnnnnnnnnnnnnnnnnnnnnnnnttctgactgctgtgatgtagtatctcattactgttttttgatatgcctctctctaattattagtaatgttgaccttttttttcatacacttgttggcccatgtttgtgttcttttgaaaagtgtttgtttatggcttttgtccactttttaatgagacttttttttttggcttgttgatttatttaagttctttatagattctggatattagacctttgtcagatgtatagtttgcaaatattttcagccattctatagattgttttttcaattgtttcttttgctgtgcagaagctctttagtttaattagatcccatttgtcaatttttgtttttgttgcaattgtttttggcatctttgtcatgaagtctttgctatggcctatgtctggaatggtatttcctaggttttcttctagggtttttatagtttggggttttgtatttaaacctttaatccatcttgagctgatttttgtgcgtgttgaaaggaaggggtccagtttcaatcttctgcatataactagccagttacccagcaccatttattaaacagtgttttcctaatttcttgtttttgtcaactttgtcaaatattagttggttgtaggtatgacactttattttggggttctctattctgttccattgatctatgtgtcttcttttttaaccagtaccatactgttttggttcctgtagccttatagtataatttgaagtcaggtaatgtgatgcctctgggtttattctttttagttaggattgctttgactgtttgagctgttttttgcttccatatgaattttacaattgttttttctaattctgtgaaaaattgcattgataatttgataggtatcacattgaatgtgtagattggctnnnnnnnnnnnnnnnnnnnnnnnnnnnnnnnnnnnnnnnnnnnnnnnnnnnnnnnnnnnnnnnnnnnnnnnnnnnnnnnnnnnnnnnnnnnnnnnnnnnnnnnnnnnnnnnnnnnnnnnnnnnnnnnnnnnnnnnnnnnnnnnnnnnnnnnnnnnnnnnnnnnnnnnnnnnnnnnnnnnnnnnnnnnnnnnnnnnnnnnnnnnnnnnnnnnnnnnnnnnnnnnnnnnnnnnnnnnnnnnnnnnnnnnnnnnnnnnnnnnnnnnnnnnnnnnnnnnnnnnnnnnnnnnnnnnnnnnnnnnnnnnnnnnnnnnnnnnnnnnnnnnnnnnnnnnnnnnnnnnnnnnnnnnnnnnnnnnnnnnnnnnnnnnnnnnnnnnnnnnnnnnnnnnnnnnnnnnnnnnnnnnnnnnnnnnnnnnnnnnnnnnnnnnnnnnnnnnnnnnnnnnnnntttcaatgtcacacttacatctttttatatggcatatttcttaacaaattattatacctagtgttatttttaataattttatcttttaacatttattctaaaataaaagtgatttacatactaccatgaaaatattagactactctaaattggactgtgtgcttacttttaccagtgagttttatactttcatatgtttttatgttataattagcctccttttctttcagctaaagaaccccctttagcagttcttgtaagataagtctgttggtgaggaatggttaatttaaatataacaaagtacaaaaagttcattggtagagtttcaggtttcatatttccactaacctttaagaaactatcatttgagtttagtctgttattaaacagaaatgttcacaattatgtgaaaagtttattaaaatattcctccttttcctcattatttatctgtgtgaggccaggttttattcatttacatcaaccaaaatagcacattctaatagatttaattcagaagcagttataaaaatacagtcatcttcaagtctgacattaaataaatttgcaaaaatgtaaaacaatgtcactcttctcactctattttttattgtttgggaaagcacaataatttttatgaaaatattattttaacaaaatcaatttattattttcattttaaaaattaggatttaaaaatttttccatttcaatttctaatacggtaactagtgataggtataacccaactcaaccaaaatctttaggattctcaaatgtttaagagtgtaaaggagtcctgaaacaaaaaagttaaacaacctagaaaaaaacaaagatattaatcagtatgatagcattcatcgattcaattaccatcatggcatccctaaaagcccatggtatatagttacatctcactgagccaccactttgaaactcccaccctgcaccaggtacttgtgagcgtgtaactttgttaatcaactgttcagggctgtatcccaacatggctttgctgcactttttgtggcacctctggtaaatctcattaggtagaccaaagggatcagttaactttttctttataacttttatttacgatattttataagtttggtaatttgcaaaggtcttggacaaagaccaggggcttatcaataataatttatctcttgaagaaacaaacaatataattggttatggagcacaggcatcataagcagaaaacaggtttataagtaaagggggaaaacctagtgtgtgttgcttgcatcaggaattcatgttaccatttggcaatatgaatttgcttagcagtgtgcagtgtgctttttttttttttttttttttttttttttttttttttgacaggattttgctctgtccccaggttagagtacagtggcccaatctcggctcactgcaacctccacctccagagttcaagtgattctcatgcctcagactcctgagtagctgggattccaggcacaagccaccatacccagctaatacaactaatttttgtacttttagtagacacagggtttcaccatgttggccagactggtctcgaactcctgacctcaggtgattcaccaacctcagcctaccaaagtgctgggattataggcatgagccactgcatccagccaccctttttagtaaatacattttgcatgaccgtgtagttgtttacagctatttatctagtaaaccaataacttacagttttttaaagacttaatggatagcatggaattattcatgatatctgcgccatatcttgagcacccactgtatacctgatgttgtactgggctttggaaatgaaaaataatgagttatcttggggaatttacaatgtaacatagaaagcttgtataactaaatttgcacaatgaaatataattaatgatagaagaagtatattatctggcagagcagagtggggaaaagtaccagcaaagacttagaatatcagctgtcctcaatacttgcacttagacttggatgagaaacagttccctgcacaagcggatgacagggttaggtatgataggagccatgtaagtaggagccactcaaaatctgagtttggtgtggctggtgtggagggttgagagaatatgaagagaggaccacaacttgaattactgagggcccttttttgattctattagtgaaatctttaaagaaattgtattggtgacagtaacagagaaataagggctttgaggatgaaaacataggctaaaaaaaaaaaaaaaaaaagcctaagaaaaaataataaagttcagtattcagtgtcctgccttaaaagcattttaggcatgcaaatatcccatatattcagaagatcctataaaaaatataaacaaaccctgtcatatacacatgaggcagaaaaaagatactttgtgagtagaaactaattgaggtaaaagaagaagaagaacttgttttagaagctgaaggcccagctgctgacttaataaaacaaattatgagaattttatttatgtgaaaatccatcctgttgaaaaaccgagtgtttaaagttttctataaacagcaacaaggtgttctaccaaaaatatatatatatatgaaaagcacattgaatacctgctttgagtatttgacttggaggaaaatagcatcactagttgagtatctctttgatagcaatatgtgttaaaagtctaacaatctcactctacccttccctgagaacgtaaaggaatatcctaaccttaagggttgtgagacctagatatttcttaccaaagaactcctgtgactctttattgcaaattttaaatagcaaactgttttgtggtggcttttagccttccagaacaagcgtattagatatgtagttccttttaataaaagtatttggaagttcaataaaggcaattatgatttttctaggaccttttccaattctgttattatgtgaatgactacccagaatttccatcaaacactgatatacaacttgctatggctacaatttattttggtgtggaaatatgtttgtttttctgttcttatgtctcccttcatacaaaagtgtaatatcccggatatgtagacatatagttctgccattcagagtaattctaatatgctttaatcttattaactatctggaagactaatgcacagctgtagctgcatttctttaagtgagtctatcatatatttgggtttataccaaactaaatttgtgaactattatccatttaaaaaatgattatttacataattatttgccttaatcttcctttaaatagcaaatgctcacgatgcattttaaaatattacctactttataaaaatccattctggatgcaaatgggggaatacctgtagtgtttattgcattgagttgttgattctttagccaatatgcatttatattttgtcttgaaagatggatcctatattgtcaacatcagttccagtgtactcattgaaagtggataaggaatatgaagtgcgtgtgagatccaaacgacgaaactctagaaattatggcgagttcagtgaggtgctctatgtaacacttcctcagatgaaccaatttacatgtgaagaaggtaaaagaaataaaagattaaaatagcagctaacctggcttttgtcaatataacagttgattcaaccctgcactgttagtgtgttgtccagatcaaaatatattagcatcagatatcacggtgagagaccttgagctcaacatctgaaacagatattgttcattgcaaaagcagaaggaagatttagtttccaaatttttcattcaggaaatgtccgggggacaggtggaagtttagagacaggaattcggtggcaatctccagatggtacaattcagatgattcttttctttatatatgtttatgttcccaaaattttctgtagtaagtttgttttgaatttataatcaggaaaaaaaaaagctgttctgatgattagggaagaaagtatgtttctatatggatggagagatatgtggcatctaagaggaaacctaatattgagtcggcataggtagtcaacagcagctgcataggttttagaaagtggaggtatggctttttcctagaggaaaggctaataagtagggtggcagtcatactcaaaggagacatggaacatttgaaaaccgtatgtaggagaatcacaacaatgattaaagttttttaaaatgggacctatgaatttagaataaaagaattaaaacttttagatacagaaataaagaaaactgattaataatgagcagaaagtatagagtattatgattctcaaatgggaattggctctattctatcttcactgaaaacagacgtttacagggctatatgtttgttaatgagataaccacaagctacatagaaaataaatttatatttctgcatttactatacaggtagaatctcatgatactaaatagcactagaatgaaaatttctgtagcaccattttctctaaactctagttaactgacttcttgtttccaaactatttgatataatgcaattctggtcttaaaagtatgatagctgtacacccttaagcttagtgtagtggcatttaattcacttaacatatattttttaaaatgtcttttcctctgttactaacaaaaaaagaaactctaactttatgttattttcctgaatatgtcactgatatgaaattagagatactacaagacaaaaaatgatttttttctcccccaccaattctttaaaatgcttatattatctccctaggggattttaataacttattaaataagaaaagactatttcagcataaaggcctacattttcaatggcaatgttcagataaatttcatctgtcatttctatgaaaaagtggttagcctctgtctctgtggtaagaatactgggaaccaactgcaaagtagctggcaggtacttaatcttaaggaatgaaatagaagttttacaaacaggttcccccaagtctcatacaaagtatactaaaacctgaagatgggagctcaatagtgatctttctgtcaattttatgtatataatatacatgatatatatttattatattttaataatttaatttcttgatataaatatgtatatttatagctgtaaaatatatgttctttgtgtctaagaagtttctgtcatgatttatcaataaaaactctgccttcatctttttgataaatcttcaatctagaggctatgataatcaccacacttaaaaaaaagtagaaaagaaaccaagtgggcattatttaggtagtgtgttaataagcaacactttttgcctagagctgaaacctttatgatactcccttgacacataatatgcttaaagcagattgtttgttttcataaaacacactgattttgcactatatgctgtttctttattttgaagtttttttaatgaggagatttgaaaagtggacagagatgttcataaaacagaaaaaaaactaagtcattgcattctgtttcagtggttatcaagagaaatcagtggctttattagatgaatacaaactgaattttttgtgaaaagggaaagggaaatgtaaactgtgcttcaactatttgtaattctgagagcgaaatattattgtgtgtttcagatttctactttccatggctcttaattattatctttggaatatttgggctaacagtgatgctatttgtattcttattttctaaacagcaaaggtaggtgtgaagtagtattctttggtattttttgccagttgtttagatttccatgtgtgtttctatttgttatttgatattttctttgtcaaattatgagtggaaattttagttaacctagtaaacttttatctccagttatatatttaccatttatataaaacccaatttgttgtatttatcatagacaacttagaggtttagattctatctggagacttgtacaggacattaagaggcttaggctggtgactatgcatacctcgtgatgtgtacctctttatccaagagctagctcttcccctcgagtcctcaacaagtttacccattcattccagatcttcagagtatcactgagcctttggctgagtctgatacagtccttatatatagacatttttttttccttgagatggagtctcactctgttgcccaggctggagtgtaatggcgcaatcttggctcactgcagccgctgccccccaggttcaagtgattctcctgcctcagcctcccgagtagctgggattacaggcacccaccactatgcccggctaatttttgtgtgtttttggtagagacagggttttgccatgttggccaggctagtctcgaactcctgatctcaatacacaggcaaaattttaagtggcaaactacccaggtagatagttaagtctaataaaacattttttagacttcatatgatgatgatttcaagtaaattcaggtttaatttaaattatttggatatttatgattttgtgtttcacctgcatttataaacacagctaaaagtctttataagtgtaaagagatttcattccactttctcttggaatcaaaagccttgagttccagttatcatttttgtcattgctgtttgaccttgtttgagtcccagaatctctccaggcctccatattcttatggttaatatgagggtatgggttatataatctttaaattttccttgagctatgatatatgttatttatattattccatttttcttcctgatagaaactcactacacactacaggaaatttttttaaacaaaatatgggaaaaatgattggtactgattgccagtgtcctacatttaaggttgttttgtttgtttgtttgttgtttttttctttgttttgttttgctttgttttgtttttttgagatgaagtcttgctctgtcacccaggctggagtctggagagtgcagtagcccaatctcagctcactgcaacctccacctcccaggtcaagcgattctcctgcctcagcctcccgagtagctgggattacagggatgtgccaccacgcccacctaattttgtatttttagatagtttcgccatgttggtcagactggcctcgaactcctgacctcaggttatccgcccgcctcagccttccaaagtgctgggattacaggcgtgagctaccgcgcctggccccatttaaggtatttttaaagtcccaatggttaaccttgcttcttctcctagaactaaggtgactgacactcccaggttgcctagagctctcctggtttttagcaatgcaagtcctgtgtgccaggaaatccctcagttccaggtaaccaaggcagttggtctccttacctagaattgaaaataggttctccagctgaagccaaaaggcatctataaatcaaaatgagatctatgttaatatattttaaagtattttaatttgttttgtaacgtagtataacatttgtaaacttcaaaatagaattttcttaggaagaagaattattgggacactagagttctcgagtgtcaagcatgctaaaagtctaactgaatgcagaaagggttattttcagtagagttttatgtccaattttataatataaaccaatgggaaagtaaaattcattctgcagaattccattttgcacctaactttctggcaacatttctattttccaaaaaagcagctatcataaatcacaatacaattttctgttgtttcaggaaaataaataaatatatttttagatttttaatttgtgtatttaagtaatgccaacaaaaaaagaaccaaattattctgttgattaatttcagttttttaatctatctatcttgtggggaaatttatacataacttcaatagataaactcacgaagtatataaagtaattatctcttagtattagttgtgaatttctagccattgtgaaggccaagtcaatttgttatgttgtttagttatattagctaacaatattaggaagaaacaattatcctctcaaaaagtagaatttccaagaaaacatattacttctaatagagtgctttttataaataatgaaattcttaactataatgtttagtcagaatcaccagattctacaattaatttgaaatctttattgttctcccaattttcctgcactaaattgaattttctgtaggaaagaattaacttttttttcatttgcccaataaaaacccttatcgttgtctaaatttgcatgttctactgaaagtgggaaatagtagcaaatatttgtcagcaagtatggacagaacatgtagttccaacaattaaattgatactacaaagaatgagatttttcttagaactgtagggctgtaaagtggcttcaggtcctacacgcctttgaaattttgtgagtccacaattcattatccaacccacttcaccctgctttaatccagttacttgagtcaactctagcaaaatttataattttatttgtatctgatacaaaatcacaaacttagtttcaagtcaggctatactggttcctaccacacaacccacccagcctttgagctgttaccaattgaggaaagaaataactgaatcagcccaaaatagaacttccaaaccaatagccaaattcagcctacagattcacattttattttattttaattagttttgattttagagtgaagattttcctacaaagtgtttgtaaaatacagaattttcacacaaaaatccagatttggggattatcttttaaaaaatgaaagatgtagtgaaactgaataaggcggcatatgctgcagcagacaaccagctgtcctatttgggactggcacacattctttaatgtgccaccatcctcattcctcctaatgactttgcaactggcttgctttattcatctgcatgatctgcttgggccccttagatttatggtctgccactgtgacataaggtcactacaacccctagaaaaccactagcacatgcctgaatgcatcatcctattcaaaaaggagaagcacacgtcacaaagtcaaacatcagccatttggaaacctttgcttcctgtcattagagttatgttccatctttttatgttttggagaatgtgaaatatcgatttagagatgcagaatcaagaaaaaaaaaaaaaaacagcaaaacagcagcatgacgcaaagaacctgggttttggtttggagtcaggttctctgggtttgagccccaactgtgccaactatcagtgcatgatttgaacatgttccttaattttccaagtttttgcacatatatatcatctgcctccctgggagtcataaggattaagtgaaatgtttagtgcaggggtcacaaacttatttcatggagtcagagtacatttttatgcttttcaagccatacagtatctgtcacaactactcaactctgccactgtggcatgaaagtggccatagacaatatggaaatgaatgaagatgcttgtgttctcataaaattttatctacacaaacaggtgacaggccagatttggcccatagaccttaatttagtgacccacagtttagtgcaaaatatatcccacagcgtctgatttatcagaagcactaaaaaatgagagtagttattattaataatttgtattgcttatttctatatctgtaattcattagtaagaatttgctttaacatttgccccactgagtagtagaggctacttaatgcaatttataaaatggaatttcccttattgcttggattaggtaaaatggcaagtagaaatattgagagaatgtattccttatgtaatggactagactgaccattcacactgagtggaatagcaactgatatccaaaaatcaggttaccacctcttcatgacagtgtcatctctgaatagtcaggagtttttttaaaagttaaatgaattgtttggaataatatctgagccttttttcagtgctataatttgatttttaaaaataaactcaggccgggcgcggtggctcacgcctgtaatccctgcactttgggaggccgaggcgggcggatcacgaggtcagtagattgagaccatcctggctaacacggtgaaaccccgtctctactaaaatacaaaaaattagccgggcgcggtggcgggcgcctgtagtcccagctactccggaggctgaggcaggagaatggcgcgaacccgggaggcggagcttgcagtgagccgagatggtgccactgcactccagcctgggcgacagagtgaagactccgcctcaaaaaaaaataaaataaaataaaaaataaaataaaataaaataaataaaaataaaaataaactccaggccagatacaatggcttatagcatataaatccagcactttgggaggatggggcgggaggattgccctgaggccaggagttccagacggctcgggcagtgactagagcaagactccattacaaaaaatgaaacaataaaaattagcctaccctgtagtcttagctacttacgaggctgaggcaggaatatcgcttggcccaggagtttgaggctgcagtgaattatgattacactactggactccaacctgggtgataaattaagatcctgtctcaaaaagtttaaaaaaaaattaaaaacaccataaactccaattacactattaattgtacaaaatagatacatgattaattcatttttatgaccgaaaaataatttaaagatttgcaacagaaaatgtaaatgcatccttgaattgtgtatataaacccatactgattagttagagatagttcaaatttagtctgtcccatctgaaatgaatcctctagtaaaaccctgtttaataagatcatcttagataatttcataattaatatgaactatatagctaacctacccaagtctaccctttttcaagggtgcaggtaatcttggctccatgtgtattgacccttttctcgttctttcttttctgtacaaattactgatgagatgtacactggaattgccttatagctgacatggaaatcagcttcagatgaaattaaatgtcttactttcaaatactatatctggctgaaaataaaaaagcattaagaaaaaaaggattgtgggaaaaacacattttcttttaatagacgtcagatgaggtttttcgggttttttaattgttcttttttttccttctacaatttttctttctcatttgctgtctaatattttcttctgtttctcatactccaattatataaagtaccagaatatttgggaaagtaatagtattgccaatattttatttctatcttttgctattattgagaatatgtagcttttaagatgtcaaaaccaaaattttatatgttttcaaggattaaaatgctgattctgcccccagttccagttccaaagattaaaggaatcaatccagatctcctcaaggtaattaataattttatctaaattgtggccagtactaattaacacctgaagaatcctgtcatatgtttaaagttttctgtgagctatatatatcacattcaattttcttgtatcttgtctcctagagaaaattttttaaaatattctctcttaaaaataagaaaatgtcatatgtataaaaagttatgcactaatttatgttttgtgatatgttttgttactgttgttcttattgtaaccataattaatctctgaacatcatttgctaattcatttaattattatgagtttcttttcatagatcttcattttctttctattttctaggaaggaaaattagaggaggtgaacgcaatcttagccattcatgatagctataaacccgaattccacagtgatgactcttgggttgaatttattgagctagatattgatgagccagatgaaaagaatgagggatcagacacagacagacttctaagcagtgaccatcagaaatcacatagtaacctaggggtgaaggatggcgactctggacgtaccagctgttatgaacctgacattctggagactgatttcaatgcaaataacatacatgagggtacctcagaggttgctcagccacagaggttaaaaggggaagcagatctcttatgccttgaccagaagaatcaaaataagtcaccttatcatgatgcttgccctgctactcagcagcccagtgttatccaagcagagaaaaacaaaccacaaccacttcctactgatggagctgagtcaactcatcaagctgcccatattcagctaagcaatccaagttcactggcaaacatcgacttttatgcccaggtgagcgacattacaccagcaggtagtgtggtcctttccccaggccaaaagaataaggcagggatgtcccagtgtgacatgcacctggaaatggtctcactctgccaagaagacttcattatggacaatgcctacttctgtgaggcagatgccaaaaagtgcatccctgtggctcctcacatcaaggttgaatcacacatagagccaagctttaaccaagaggacatttacatcaccaccgaaagccttaccactactgctgggaggcctgggacaacagaacatattccaggttctgagatgcctgtcccagactatacctccattcatatagtacagtccccacagggcctcatactcaatgcaactgccttgcccttgcctggcaaagagtttctctcgtcgtgtggctatgtgagcacagaccaactgaacaaaatcatgccttagcctttctttgatttcccaagagctacgtatttaatggcaaagaattggctggggcaataatgtttaaaccaaaacaatgtttaaaccttttttgcaggggtgacagggtgggatatggattctaaaatgccttttcccgaaatgctgaaatatgatgttaaaaaaataagaagaatgctcaatcagatagatatttctattgtgcaatgtaaatattttaaagaatggtgtcagactgtttagtagcagtgattgtcttattattgtgggtgttaatttttgatactaagcattgaatggctatgtttttaatgtgtagtaaatcacgctttttgaaaaagcgaaaaaatcaggtggcttttgcggttcaggaaaattgaatgcaaaccatagcacaggctatttttttgttgtttcttaaataaaaaaacttttttatttaaaaaattaaattaaaactagaggtgagaaaatcaaactgtaagcaagaaggcaaaaatagtttggatatgtaaaacatttattttgacataaaattgataaagatatttttaataatttagacttcaagcatggctattttatattacactacacactgtgtactgcagttggtgtgacccctctaaggagtatagcaactacagtctaaagctggtttaatgttttggctaatgcacctaaagaaaaacaaactagttttttacaaagcccttttatacctccccagactccttcaacaattctaaaatgattgtagtaatctgcattattggaacataattgttttttaaacaaatatttttttagcaaatttttaaacaaatatttgttaatttagaaaactttaaagtgtttgcacagatcaacttaccgggcaccaaaagaagtaaaagcaaaaaaagaaaacctttcttcaccaaatcttggttcatgccaaaaaaatacatgctaagagaagtagaaatcgtagctggttcatactgaccaagatgcttaagtgctgcagttgcacatggagtgagttttttagtgtgtgcagatggtgagagataagatctatagcctctgcagcagaatctgttcacactcaacttggttttgttacataattatccaggaagggaataaggtacaagaagcattttgtaagttgaagcaaatcaaatgaaattaactgggtaatcaagcaaagagttcaagaaataggtttttgtttcacagcctataaccagacacatactcatttttcatggtaatgaacagaacatagaagaaacaaggttttcagtccccacagataactgaaaattatttaaacctctaaaagaaactttctttctcactaaatcttttataggatttatttaaaatagcaaaagaagaagtttcatcattttttacttcctctctgagtggattggcctcaaagcaagcattcagaagaaaaagaagggacctcaataatttagaaattattttgcaatcccttaatatcctaaacatcaggttttgttgttgttgttgttgttgttgagatggagtctcactctgtcgccaggctagagtacagtggcgcgatcttggctcactgcaatctccacctcccccaggttcaagcaattcccctgcctcagcctcctgagtagctgggactacaggcacgcaccaccatgccaggctaatttttttgtatgttagcagagatggggtttcaccatgttggccaggatggtctcaatctcctgacctcatgatccgcacaacttggcctccaaaagtgctgggattacaagcgtgagccaccgcgcccggccctaaacatcatttttaagagcattgggatatttcctgaaaaggtttatgaaaaagaagaatctcatctcagtgaagaatacttctcatttttaaaaaaagcttaaaactttgaagttagctttaacttaaatagtatttcccatttatcgcagaccttttttaggaagcaagcttaatgcctgataattttgaattccctttcttgcaggaagggctatgaaaagctagaattgagtgtttaaagttcaacatgttatttgtaatagatgtttaatagatgttctgctactttgctgctatggttttctccaagagctacataatttagtttcatataaagtatcatcagtgtagaacctaattcagttcaaagctgtgtgtttggaagactatcttactatttcacaacagcctgacaacatttctatagccaaaaatagctaaatacctcaatcagtctcagaatgtcattttggtactttggtggccacacaagccattattcactagtatgactagttgtgtctggcagtttatatttaactctctttatttctgtggattttttccttcaaagtttaataaatttattttcttggattcctgatagtgtgcttctgttatcaaacaccaacataaaaatcatctaaaccactctgtatactgtgaattatcattgtaaggagagcttagcaccactggatcaaatacatcagccctgggtatggagatttttatgggctgggatatagagagggaaacataaaccccttcccttattttttgaggagacaaaagcccagctcagaaatatcctactggcttggccctccccttaggctgtgactccccatgggcaaaggttcatagagctgtgtatttgatgcatcatagaaaataaatgacatgggtgtggagtgagggagagtgacatgtgagcattatctttatatttccagcttgagcatgttgtctggaaggaaggaaagcagctcttcctctgccattcacccattggcctaactcagtttattggactagctgcttgttatcatgggaatcagctaataagtcaggcttgggagaaaagctgattaggtaggttgtgtaggagcttgagagagccatgaagtatagattcctacaacaggaggcaggctgcaggtgaggtggctactgaaccctaggctcctgagcaggcactggattctgaaatgtaggaatctggtgatgacattgataaatctactaaacaatgaggtattacttcagcaagtcgaatgcaaaatgccacaactttctataatactcaagggttatatttaaaaaaaaaaaaaaaagtcttcatctgctgccttctgccctgtgagcagtcattacctgaaagaactatggagtgaagcctcagggattcttcatatggatgctttaaggtatgaggagtatagggaaaaggaagcctgcctacttccatggattgaaataacacagttctgtttcagaagattaatgatgtgttgaaaatggctacacacgtttcagcatttcagtttctcaaagtttctaacactttattcaagtgctataatatttacatatttacatatttttataccaaaatatgtctttttatgtgcttgttatgtgggtaagaaatagtgaccagaaaaaccagaagttacttaaatataaactttttagtttggaatccaaaatcccacataatttgccccagtctcctttgacagtttagaatttaagacctagatgtaaatatgtctggaataggtggcttcttggtctcactgacttcaagaatgaagctgcagacccttgtggtgttacagttcttaaagatggtgtgtccggagtttgt

SEQ ID NO: 2333 - DNA, 4178 bp, Mus musculus
gacaacccacgagctgccaagcagggcgcagccatgggaagaggaggcggtctagggagcggcggcactggcagaggcggctgctacagcggcggtggcggcgacggctgttactgaaccccggcagccgcggggatcccgggctgggtccacgcgggcctgaggcctcggctccagcagcccccaagcggacacgaacccgcgttctgtctcccgaggcgaaactccgaggtctcaggtatggatctttgtcaggtcttcttaaccttggcactggcagtcaccagcagcacattttctggaagtgaggctacaccagctactcttggcaaagcttccccagttctgcaaagaatcaatccaagcctggggacaagttcttctggaaagcctcgattcaccaagtgtcgttcccctgaactggagacattttcatgctactggacagaaggagataatcctgatttaaagaccccaggatctattcagctgtactatgctaaaagggaaagccaacgacaagctgcaagaattgctcatgaatggacccaggaatggaaagaatgccctgattatgtctctgctggaaaaaacagctgttacttcaactcatcatatacctccatttggataccctactgcatcaagctaactacaaatggtgatttgctggaccaaaaatgtttcactgttgacgaaatagtgcaacctgatccacccattggcctcaactggactttactaaacattagtttgaccgggattcgtggagacatccaagtgagttggcaaccaccacccaatgcagatgttctgaagggatggataattctggagtatgaaattcagtacaaagaagtaaatgaatcaaaatggaaagtgatgggccctatatggttaacatactgtccagtgtactcattgagaatggataaagaacatgaagtgcgggtgagatccagacaacggagctttgaaaagtacagcgagttcagcgaagtcctccgtgtaatatttcctcagacgaacatattggaagcatgtgaagaagatatccagtttccatggttcttaattattatctttggaatatttggagtagcagtgatgctatttgtagttatattttcaaagcagcaaaggattaagatgctgattttacccccagtcccagttccaaagattaaagggattgatccagatcttctcaaggaagggaagttggaggaggtgaacaccatcttaggcattcatgataactacaaacccgacttctacaatgatgattcctgggtcgagttcattgagctagatattgatgaagcagatgtggatgagaagactgaagggtctgacacagacagacttctaagcaatgatcatgagaaatcagctggtatccttggagcaaaggatgatgattctgggcgtaccagctgttacgaccctgacattttggatactgatttccataccagtgacatgtgtgatggtaccttgaagtttgctcagtcacagaagttaaatatggaagctgatctcttgtgccttgatcagaagaatctgaagaacttgccttatgatgcttcccttggctctctgcatccctccattacccagacagtagaagaaaacaagccacagccacttttgagcagcgaaactgaggcaacccaccaactcgcctctacaccgatgagtaatcccacatcactggcaaacattgacttttatgcccaagtaagcgacattacaccagcaggtggtgtagtcctttccccaggccaaaagattaaggcagggatagcccaaggcaatacccagcgggaggtggccacgccctgccaagaaaattacagcatgaacagtgcctacttttgtgagtcagatgccaaaaaatgcatcgctgtggcccctcgcatggaagccacgtcttgtataaaaccaagctttaaccaagaggacatttacatcaccacagaaagccttaccactactgcccagatgtctgagacagcagatattgctccagatgctgagatgtctgtcccagactacaccacggttcacaccgtgcagtctccaaggggccttatactcaacgcaactgctttgcctttgcctgacaaaaagaattttccctcctcgtgtggttatgtgagcacagaccaactgaacaaaatcatgcagtagcctttcctatctttaatggcaagggaaaggctgggcacaaacgcttaaaccaaaactatgttttaaatctgtgttgggagagcatgagagtggatatggattctaaaatactttttctggaaatgtcaaaatatcataaagtggaaaatcaagaattcgtaatcagataaatgctcccattgtgaattataaatattttaatgaattgtctttaagactgtatagtggcagtgattgtctgtactgtgggtcttaattttgtgatactaagcattaaatagctacgttttttatgtatgtagatcatgctttttgaaaaagcaaaacaatcaggtggcttttgcagttcaggaaattgaatgcagattatagcacaggctgattttttttttcttttttaaataactgggaactaaaactctaggtgagaaggtaaaactagtttggatatgcaaaacatttattttgacatgaaattgataaagatatttttaataatttacactttaagcatgagtactttataatatgctacacacatattgtagttcagaacaatccatctaaggatgtagcagctacagtgtaaagagggtttcatgttttggtcaatgaacgtaaagaaaaccaaacaagttagatttttacaaagcccttttataacttccaaaacttcttaactctaaaaatgtctaataacctgcattattagaaaaaaacattttaaatttgtaaacgaatatttttttaattttgaaaactttatttttttttaatgttgaatcaacgtatcatacaccaaacagtaaacagaaattataataatggaagaagtgctttcttcgacaaatttccattcaagccacacagctacatgtaagagaagtagaagtgatgtggtgtgattggctaggatgcagaagagcttcaggaatacaagaagtgagagcccaaggattgggaggagggggctctcacatctccacagtgcagtctgtcaaacccagcttggtttttatagtattctaagaattattgtgtacaaggaaaagtctcacatgtatgaaatccagtatccagatggggtaaagttagcagataataggataggaaattaaagacctagatcttttttcacagacagacacaaatttttaattcagggagaagggacagaataaatgacttcccactcacaaagcacaactcagaagtaattaaacaggtaacagaaaccttgccatcaaacctttgataagatgtattttaagtagtaagcagtatttcaatgcttcttacttaccctcccaggacaaccgatctcaaataagggagataaggtagataaaaatcactttttgattctgtaataacataaacatagttctttgggttagcaccccccccaaaaaaaatttatgggagaaagaggactctcagctgactgaagaatacatctcatttaaatattttttagatgcctgaaactttaaaattacctttaagttttaatggtatttaccattttgccaagacctttgtggggaaacaagcttaatgtttagtgattttgaaatctctttcatgcaggagagacagtgaaaatctagccttgggtgtttaaggttcgccttgttactttgtaatagattttaataagtttttctgctactttgctgctatggtttctccaatggctacatgatttagttcatatgaagtatcatcaacttagaatctattcagcttaaagatgtgtgttttgatgaactatcttaccatttcaccataggctgaccacgtttctatagccaaaaatagctaaatacctcaatcagttccagaatgtcattttttggtactttgctggccacacaagccgttattcaccgtttaactagttgtgttctgcagtctatatttaactttctttatgtctgtggatttttcccttcaaagttcaataaatttattttcttggaaaa

SEQ ID NO: 2334 - DNA, 20 bp, Artificial sequence
  Synthetic oligonucleotide
tgccaactcacttggatgtc

SEQ ID NO: 2335 - DNA, 20 bp, Artificial sequence
  Synthetic oligonucleotide
gagacttttccttgtacaca
